(19) United States
(12) Patent Application Publication
(10) Pub. No.: US 2024/0309387 A1
(43) Pub. Date: Sep. 19, 2024

(54) TMPRSS6 iRNA COMPOSITIONS AND METHODS OF USE THEREOF

(71) Applicant: Alnylam Pharmaceuticals, Inc., Cambridge, MA (US)

(72) Inventors: James Butler, Lynnfield, MA (US); Brian Bettencourt, Groton, MA (US); Kallanthottathil G. Rajeev, Wayland, MA (US); Martin A. Maier, Belmont, MA (US); Klaus Charisse, Acton, MA (US)

(21) Appl. No.: 18/376,217

(22) Filed: Oct. 3, 2023

Related U.S. Application Data
(63) Continuation of application No. 17/121,885, filed on Dec. 15, 2020, now abandoned.
Application No. 17/121,885 is a continuation of application No. 16/191,579, filed on Nov. 15, 2018, now Pat. No. 10,913,950.
Application No. 16/191,579 is a division of application No. 15/695,254, filed on Sep. 5, 2017, now abandoned.
Application No. 15/695,254 is a continuation of application No. 14/947,025, filed on Nov. 20, 2015, now Pat. No. 9,783,806.
Application No. 14/947,025 is a continuation of application No. PCT/US2014/039149, filed on May 22, 2014.
(60) Provisional application No. 61/912,988, filed on Dec. 6, 2013.
(60) Provisional application No. 61/826,178, filed on May 22, 2013.

(51) Int. Cl. C12N 15/113; C12N 9/64

(52) U.S. Cl. CPC C12N 15/1138; C12N 9/6424; C12N 15/113; C12N 15/1137; C12N 2310/11; C12N 2310/14; C12N 2310/315; C12N 2310/316; C12N 2310/321; C12N 2310/322; C12N 2310/343; C12N 2310/351; C12N 2310/3521; C12N 2310/3533; C12N 2320/30

(57) ABSTRACT

The invention relates to RNAi agents, e.g., double-stranded RNAi agents, targeting the TMPRSS6 gene, and methods of using such RNAi agents to inhibit expression of TMPRSS6 and methods of treating subjects having a TMPRSS6 associated disorder, e.g., an iron overload associated disorder, such as β-thalassemia or hemochromatosis.

### RELATED APPLICATIONS

[0001] This application is a continuation of Ser. No. 17/121,885, filed on Dec. 15, 2020; which is a continuation of U.S. patent application Ser. No. 16/191,579, filed on Nov. 15, 2018, now U.S. Pat. No. 10,913,950, issued on Feb. 9, 2021; which is a divisional of U.S. patent application Ser. No. 15/695,254, filed on Sep. 5, 2017, abandoned; which is a continuation of U.S. patent application Ser. No. 14/947,025, filed on Nov. 20, 2015, now U.S. Pat. No. 9,783,806, issued on Oct. 10, 2017; which is a 35 § U.S.C. 111(a) continuation application which claims the benefit of priority to PCT/US2014/039149, filed on May 22, 2014; which, in turn, claims priority to U.S. Provisional Patent Application No. 61/826,178, filed on May 22, 2013, and U.S. Provisional Patent Application No. 61/912,988, filed on Dec. 6, 2013. The entire contents of each of the foregoing patent applications are hereby incorporated herein by reference.

### SEQUENCE LISTING

[0002] The application contains a Sequence Listing which has been submitted electronically in .XML format and is hereby incorporated by reference in its entirety. Said .XML copy, created on May 31, 2024, is named “121301-00708.xml” and is 14,791,553 bytes in size. The sequence listing contained in this .XML file is part of the specification and is hereby incorporated by reference herein in its entirety.

### BACKGROUND OF THE INVENTION

[0003] TMPRSS6 (Transmembrane Protease, Serine 6) gene encodes TMPRSS6, also known as matriptase-2, a type II serine protease. It is primarily expressed in the liver, although high levels of TMPRSS6 mRNA are also found in the kidney, with lower levels in the uterus and much smaller amounts detected in many other tissues (Ramsay et al., Haematologica (2009), 94(6), 840-849). TMPRSS6 plays a role in iron homeostatis by binding and proteolytically degrading the hepcidin activator and BMP co-receptor HJV (hemojuvelin), which causes down-regulation of hepcidin levels.

[0004] TMPRSS6 consists of a short N-terminal intracytoplasmic tail, a type II transmembrane domain, a stem region composed of two extracellular CUB (complement factor Cls/Clr, urchin embryonic growth factor and BMP (bone morphogenetic protein)) domains, three LDLR (low-density-lipoprotein receptor class A) domains, and a C-terminal trypsin-like serine protease domain. There are also consensus sites for N-glycosylation in the extracellular domain, and a potential phosphorylation site in the intracytoplasmic tail region.

[0005] Numerous disorders can be associated with iron overload, a condition characterized by increased levels of iron. Iron overload can result in excess iron deposition in various tissues and can lead to tissue and organ damage. Accordingly, methods for effective treatment of disorders associated with iron overload are currently needed.

### SUMMARY OF THE INVENTION

[0006] The present invention provides compositions comprising RNAi agents, e.g., double-stranded iRNA agents, targeting TMPRSS6. The present invention also provides methods using the compositions of the invention for inhibiting TMPRSS6 expression and for treating TMPRSS6 associated disorders, e.g., iron overload associated disorders, such as thalassemia, e.g., β-thalassemia, or hemochromatosis.

[0007] Accordingly, in one aspect, the present invention provides RNAi agents, e.g., double-stranded RNAi agents, capable of inhibiting the expression of TMPRSS6 (matriptase-2) in a cell, wherein the double stranded RNAi agent comprises a sense strand and an antisense strand forming a double-stranded region, wherein the sense strand comprises at least 15 contiguous nucleotides differing by no more than 3 nucleotides from any one of the nucleotide sequences of SEQ ID NO:1, SEQ ID NO:2, or SEQ ID NO:3, SEQ ID NO:4, or SEQ ID NO:5, and the antisense strand comprises at least 15 contiguous nucleotides differing by no more than 3 nucleotides from any one of the nucleotide sequences of SEQ ID NO:6, SEQ ID NO:7, or SEQ ID NO:8, SEQ ID NO:9, or SEQ ID NO: 10,
[0008] wherein substantially all of the nucleotides of the sense strand and substantially all of the nucleotides of the antisense strand are modified nucleotides, and
[0009] wherein the sense strand is conjugated to a ligand attached at the 3′-terminus.

[0010] In one embodiment, all of the nucleotides of said sense strand and all of the nucleotides of said antisense strand are modified nucleotides.

[0011] In one embodiment, the sense strand and the antisense strand comprise a region of complementarity which comprises at least 15 contiguous nucleotides differing by no more than 3 nucleotides from any one of the antisense sequences listed in any one of Tables 1, 2, 4, 5, 8, 10, and 12.

[0012] In one embodiment, at least one of the modified nucleotides is selected from the group consisting of a 3′-terminal deoxy-thymine (dT) nucleotide, a 2′-O-methyl modified nucleotide, a 2′-fluoro modified nucleotide, a 2′-deoxy-modified nucleotide, a locked nucleotide, an abasic nucleotide, a 2′-amino-modified nucleotide, a 2′-alkyl-modified nucleotide, a morpholino nucleotide, a phosphoramidate, a non-natural base comprising nucleotide, a nucleotide comprising a 5′-phosphorothioate group, a nucleotide comprising a 5′ phosphate or 5′ phosphate mimic (see, e.g., PCT Publication No. WO 2011/005860), and a terminal nucleotide linked to a cholesteryl derivative or a dodecanoic acid bisdecylamide group.

[0013] In one embodiment, at least one strand comprises a 3′ overhang of at least 1 nucleotide. In another embodiment, at least one strand comprises a 3′ overhang of at least 2 nucleotides.

[0014] In another aspect, the present invention provides RNAi agents, e.g., double-stranded RNAi agents, capable of inhibiting the expression of TMPRSS6 (matriptase-2) in a cell, wherein the double stranded RNAi agent comprises a sense strand complementary to an antisense strand, wherein the antisense strand comprises a region complementary to part of an mRNA encoding TMPRSS6, wherein each strand is about 14 to about 30 nucleotides in length, wherein the double stranded RNAi agent is represented by formula (III):

sense: 5′ nₚ-Nₐ-(X X X)ᵢ-N_{b}-Y Y Y-N_{b}-(ZZZ)ⱼ-Nₐ-n_{q} 3′

antisense: 3′ nₚ′-Nₐ′-(X′X′X′)ₖ-N_{b}′-Y′Y′Y′-N_{b}′-(Z′Z′Z′)ₗ-Nₐ′-n_{q}′ 5′ (III)
[0015] wherein:
[0016] i, j, k, and l are each independently 0 or 1;
[0017] p, p′, q, and q′ are each independently 0-6;
[0018] each Nₐ and Nₐ′ independently represents an oligonucleotide sequence comprising 0-25 nucleotides which are either modified or unmodified or combinations thereof, each sequence comprising at least two differently modified nucleotides;
[0019] each N_{b} and N_{b}′ independently represents an oligonucleotide sequence comprising 0-10 nucleotides which are either modified or unmodified or combinations thereof;
[0020] each nₚ, nₚ′, n_{q}, and n_{q}′, each of which may or may not be present, independently represents an overhang nucleotide;
[0021] XXX, YYY, ZZZ, X′X′X′, Y′Y′Y′, and Z′Z′Z′ each independently represent one motif of three identical modifications on three consecutive nucleotides;
[0022] modifications on N_{b} differ from the modification on Y and modifications on N_{b}′ differ from the modification on Y′; and
[0023] wherein the sense strand is conjugated to at least one ligand.

[0024] In one embodiment, i is 0; j is 0; i is 1; j is 1; both i and j are 0; or both i and j are 1. In another embodiment, k is 0; 1 is 0; k is 1; 1 is 1; both k and l are 0; or both k and l are 1.

[0025] In one embodiment, XXX is complementary to X′X′X′, YYY is complementary to Y′Y′Y′, and ZZZ is complementary to Z′Z′Z′.

[0026] In one embodiment, YYY motif occurs at or near the cleavage site of the sense strand.

[0027] In one embodiment, Y′Y′Y′ motif occurs at the 11, 12 and 13 positions of the antisense strand from the 5′-end.

[0028] In one embodiment, Y′ is 2′-O-methyl.

[0029] In one embodiment, formula (III) is represented by formula (IIIa):

sense: 5′ nₚ-Nₐ-Y Y Y-Nₐ-n_{q} 3′

antisense: 3′ nₚ′-Nₐ′-Y′Y′Y′-Nₐ′-n_{q}′ 5′ (IIIa).

[0030] In another embodiment, formula (III) is represented by formula (IIIb):

sense: 5′ nₚ-Nₐ-Y Y Y-N_{b}-ZZZ-Nₐ-n_{q} 3′

antisense: 3′ nₚ′-Nₐ′-Y′Y′Y′-N_{b}—Z′Z′Z′-Nₐ′-n_{q}′ 5′ (IIIb)
[0031] wherein each N_{b} and N_{b}′ independently represents an oligonucleotide sequence comprising 1-5 modified nucleotides.

[0032] In yet another embodiment, formula (III) is represented by formula (IIIc):

sense: 5′ nₚ-Nₐ—XXX-N_{b}-Y Y Y-Nₐ-n_{q} 3′

antisense: 3′ nₚ′-Nₐ′-X′X′X′-N_{b}-Y′Y′Y′-Nₐ′-n_{q}′ 5′ (IIIc)
[0033] wherein each N_{b} and N_{b}′ independently represents an oligonucleotide sequence comprising 1-5 modified nucleotides.

[0034] In one embodiment, formula (III) is represented by formula (IIId):

sense: 5′ nₚ-Nₐ-X X X-N_{b}-Y Y Y-N_{b}-ZZZ-Nₐ-n_{q} 3′

antisense: 3′ nₚ′-N_{a′}-X′X′X′-N_{b′}-Y′Y′Y′-N_{b}-Z′Z′Z′-Nₐ′-n_{q}′ 5′ (IIId)
[0035] wherein each N_{b} and N_{b}′ independently represents an oligonucleotide sequence comprising 1-5 modified nucleotides and each Nₐ and Nₐ′ independently represents an oligonucleotide sequence comprising 2-10 modified nucleotides.

[0036] In one embodiment, the double-stranded region is 15-30 nucleotide pairs in length. In another embodiment, the double-stranded region is 17-23 nucleotide pairs in length. In yet another embodiment, the double-stranded region is 17-25 nucleotide pairs in length. In one embodiment, the double-stranded region is 23-27 nucleotide pairs in length. In another embodiment, the double-stranded region is 19-21 nucleotide pairs in length. In another embodiment, the double-stranded region is 21-23 nucleotide pairs in length. In one embodiment, each strand has 15-30 nucleotides. In another embodiment, each strand has 19-30 nucleotides.

[0037] In one embodiment, the modifications on the nucleotides are selected from the group consisting of LNA, HNA, CeNA, 2′-methoxyethyl, 2′-O-alkyl, 2′-O-allyl, 2′-C-allyl, 2′-fluoro, 2′-deoxy, 2′-hydroxyl, and combinations thereof. In another embodiment, the modifications on the nucleotides are 2′-O-methyl or 2′-fluoro modifications.

[0038] In one embodiment, the ligand is one or more GalNAc derivatives attached through a bivalent or trivalent branched linker. In another embodiment, the ligand is

[chemical structure]

[0039] In one embodiment, the ligand is attached to the 3′ end of the sense strand.

[0040] In one embodiment, the RNAi agent is conjugated to the ligand as shown in the following schematic

[chemical structure]

[0041] wherein X is O or S. In a specific embodiment, X is O.

[0042] In one embodiment, the agent further comprises at least one phosphorothioate or methylphosphonate internucleotide linkage.

[0043] In one embodiment, the phosphorothioate or methylphosphonate internucleotide linkage is at the 3′-terminus of one strand. In one embodiment, the strand is the antisense strand. In another embodiment, the strand is the sense strand.

[0044] In one embodiment, the phosphorothioate or methylphosphonate internucleotide linkage is at the 5′-terminus of one strand. In one embodiment, the strand is the antisense strand. In another embodiment, the strand is the sense strand.

[0045] In one embodiment, the phosphorothioate or methylphosphonate internucleotide linkage is at the both the 5′- and 3′-terminus of one strand. In one embodiment, the strand is the antisense strand.

[0046] In one embodiment, the RNAi agent comprises 6-8 phosphorothioate internucleotide linkages.

[0047] In one embodiment, the antisense strand comprises two phosphorothioate internucleotide linkages at the 5′-terminus and two phosphorothioate internucleotide linkages at the 3′-terminus, and the sense strand comprises at least two phosphorothioate internucleotide linkages at either the 5′-terminus or the 3′-terminus.

[0048] In one embodiment, the base pair at the 1 position of the 5′-end of the antisense strand of the duplex is an AU base pair.

[0049] In one embodiment, the Y nucleotides contain a 2′-fluoro modification.

[0050] In one embodiment, the Y′ nucleotides contain a 2′-O-methyl modification.

[0051] In one embodiment, p′>0. In another embodiment, p′=2.

[0052] In one embodiment, q′=0, p=0, q=0, and p′ overhang nucleotides are complementary to the target mRNA. In another embodiment, q′=0, p=0, q=0, and p′ overhang nucleotides are non-complementary to the target mRNA.

[0053] In one embodiment, the sense strand has a total of 21 nucleotides and the antisense strand has a total of 23 nucleotides.

[0054] In one embodiment, at least one nₚ′ is linked to a neighboring nucleotide via a phosphorothioate linkage.

[0055] In one embodiment, all nₚ′ are linked to neighboring nucleotides via phosphorothioate linkages.

[0056] In one embodiment, the RNAi agent is selected from the group of RNAi agents listed in any one of Tables 1, 2, 4, 5, 8, 10, and 12.

[0057] In one embodiment, the RNAi agent is AD-59743. In another embodiment, the RNAi agent is AD-60940.

[0058] In one aspect, the present invention provides double stranded RNAi agents for inhibiting expression of TMPRSS6 in a cell,
[0059] wherein the double stranded RNAi agent comprises a sense strand and an antisense strand forming a double stranded region,
[0060] wherein the sense strand comprises at least 15 contiguous nucleotides differing by no more than 3 nucleotides from any one of the nucleotide sequences of SEQ ID NO:1, SEQ ID NO:2, or SEQ ID NO:3, SEQ ID NO:4, or SEQ ID NO:5, and the antisense strand comprises at least 15 contiguous nucleotides differing by no more than 3 nucleotides from any one of the nucleotide sequences of SEQ ID NO:6, SEQ ID NO:7, or SEQ ID NO:8, SEQ ID NO:9, or SEQ ID NO:10,
[0061] wherein substantially all of the nucleotides of the sense strand comprise a modification selected from the group consisting of a 2′-O-methyl modification and a 2′-fluoro modification,
[0062] wherein the sense strand comprises two phosphorothioate internucleotide linkages at the 5′-terminus,
[0063] wherein substantially all of the nucleotides of the antisense strand comprise a modification selected from the group consisting of a 2′-O-methyl modification and a 2′-fluoro modification,
[0064] wherein the antisense strand comprises two phosphorothioate internucleotide linkages at the 5′-terminus and two phosphorothioate internucleotide linkages at the 3′-terminus, and
[0065] wherein the sense strand is conjugated to one or more GalNAc derivatives attached through a branched bivalent or trivalent linker at the 3′-terminus.

[0066] In one embodiment, all of the nucleotides of the sense strand and all of the nucleotides of the antisense strand comprise a modification.

[0067] In another aspect, the present invention provides RNAi agents, e.g., double stranded RNAi agents, capable of inhibiting the expression of TMPRSS6 (matriptase-2) in a cell, wherein the double stranded RNAi agent comprises a sense strand complementary to an antisense strand, wherein the antisense strand comprises a region complementary to part of an mRNA encoding TMPRSS6, wherein each strand is about 14 to about 30 nucleotides in length, wherein the double stranded RNAi agent is represented by formula (III):

sense: 5′ nₚ-Nₐ-(X X X)ᵢ-N_{b}-Y Y Y-N_{b}-(ZZZ)ⱼ-Nₐ-n_{q} 3′

antisense: 3′ nₚ′-Nₐ′-(X′X′X′)ₖ-N_{b}′-Y′Y′Y′-N_{b}′-(Z′Z′Z′)ₗ-Nₐ′-n_{q}′ 5′ (III)
[0068] wherein:
[0069] i, j, k, and l are each independently 0 or 1;
[0070] p, p′, q, and q′ are each independently 0-6;
[0071] each Nₐ and Nₐ′ independently represents an oligonucleotide sequence comprising 0-25 nucleotides which are either modified or unmodified or combinations thereof, each sequence comprising at least two differently modified nucleotides;
[0072] each N_{b} and N_{b}′ independently represents an oligonucleotide sequence comprising 0-10 nucleotides which are either modified or unmodified or combinations thereof;
[0073] each nₚ, nₚ′, n_{q}, and n_{q}′, each of which may or may not be present independently represents an overhang nucleotide;
[0074] XXX, YYY, ZZZ, X′X′X′, Y′Y′Y′, and Z′Z′Z′ each independently represent one motif of three identical modifications on three consecutive nucleotides, and wherein the modifications are 2′-O-methyl or 2′-fluoro modifications;
[0075] modifications on N_{b} differ from the modification on Y and modifications on N_{b}′ differ from the modification on Y′; and
[0076] wherein the sense strand is conjugated to at least one ligand.

[0077] In yet another aspect, the present invention provides RNAi agents, e.g., double stranded RNAi agents, capable of inhibiting the expression of TMPRSS6 (matriptase-2) in a cell, wherein the double stranded RNAi agent comprises a sense strand complementary to an antisense strand, wherein the antisense strand comprises a region complementary to part of an mRNA encoding TMPRSS6, wherein each strand is about 14 to about 30 nucleotides in length, wherein the double stranded RNAi agent is represented by formula (III):

sense: 5′ nₚ-Nₐ-(X X X)ᵢ-N_{b}-Y Y Y-N_{b}-(ZZZ)ⱼ-Nₐ-n_{q} 3′

antisense: 3′ nₚ′-Nₐ′-(X′X′X′)ₖ-N_{b}′-Y′Y′Y′-ND′-(Z′Z′Z′)ₗ-Nₐ′-n_{q}′ 5′ (III)
[0078] wherein:
[0079] i, j, k, and l are each independently 0 or 1;
[0080] each nₚ, n_{q}, and n_{q}′, each of which may or may not be present, independently represents an overhang nucleotide;
[0081] p, q, and q′ are each independently 0-6;
[0082] nₚ′>0 and at least one nₚ′ is linked to a neighboring nucleotide via a phosphorothioate linkage;
[0083] each Nₐ and Nₐ′ independently represents an oligonucleotide sequence comprising 0-25 nucleotides which are either modified or unmodified or combinations thereof, each sequence comprising at least two differently modified nucleotides;
[0084] each N_{b} and N_{b}′ independently represents an oligonucleotide sequence comprising 0-10 nucleotides which are either modified or unmodified or combinations thereof;
   [0085] XXX, YYY, ZZZ, X′X′X′, Y′Y′Y′, and Z′Z′Z′ each independently represent one motif of three identical modifications on three consecutive nucleotides, and wherein the modifications are 2′-O-methyl or 2′-fluoro modifications;
   [0086] modifications on N_{b} differ from the modification on Y and modifications on N_{b}′ differ from the modification on Y′; and
   [0087] wherein the sense strand is conjugated to at least one ligand.

[0088] In a further aspect, the present invention provides RNAi agents, e.g., double stranded RNAi agents, capable of inhibiting the expression of TMPRSS6 (matriptase-2) in a cell, wherein the double stranded RNAi agent comprises a sense strand complementary to an antisense strand, wherein the antisense strand comprises a region complementary to part of an mRNA encoding TMPRSS6, wherein each strand is about 14 to about 30 nucleotides in length, wherein the double stranded RNAi agent is represented by formula (III):

sense: 5′ nₚ-Nₐ-(X X X)ᵢ-N_{b}-Y Y Y-N_{b}-(ZZZ)ⱼ-Nₐ-n_{q} 3′

antisense: 3′ nₚ′-Nₐ′-(X′X′X′)ₖ-N_{b}′-Y′Y′Y′-N_{b}′-(Z′Z′Z′)ₗ-Nₐ′-n_{q}′ 5′ (III)
[0089] wherein:
[0090] i, j, k, and l are each independently 0 or 1;
[0091] each nₚ, n_{q}, and n_{q}′, each of which may or may not be present, independently represents an overhang nucleotide;
[0092] p, q, and q′ are each independently 0-6;
[0093] nₚ′>0 and at least one nₚ′ is linked to a neighboring nucleotide via a phosphorothioate linkage;
[0094] each Nₐ and Nₐ′ independently represents an oligonucleotide sequence comprising 0-25 nucleotides which are either modified or unmodified or combinations thereof, each sequence comprising at least two differently modified nucleotides;
[0095] each N_{b} and N_{b}′ independently represents an oligonucleotide sequence comprising 0-10 nucleotides which are either modified or unmodified or combinations thereof;
   [0096] XXX, YYY, ZZZ, X′X′X′, Y′Y′Y′, and Z′Z′Z′ each independently represent one motif of three identical modifications on three consecutive nucleotides, and wherein the modifications are 2′-O-methyl or 2′-fluoro modifications;
   [0097] modifications on N_{b} differ from the modification on Y and modifications on N_{b}′ differ from the modification on Y′; and
   [0098] wherein the sense strand is conjugated to at least one ligand, wherein the ligand is one or more GalNAc derivatives attached through a bivalent or trivalent branched linker.

[0099] In another aspect, the present invention provides RNAi agents, e.g., double stranded RNAi agents capable of inhibiting the expression of TMPRSS6 (matriptase-2) in a cell, wherein the double stranded RNAi agent comprises a sense strand complementary to an antisense strand, wherein the antisense strand comprises a region complementary to part of an mRNA encoding TMPRSS6, wherein each strand is about 14 to about 30 nucleotides in length, wherein the double stranded RNAi agent is represented by formula (III):

sense: 5′ nₚ-Nₐ-(X X X)ᵢ-N_{b}-Y Y Y-N_{b}-(ZZZ)ⱼ-Nₐ-n_{q} 3′

antisense: 3′ nₚ′-Nₐ′-(X′X′X′)ₖ-N_{b}′-Y′Y′Y′-NB′-(Z′Z′Z′)ₗ-Nₐ′-n_{q}′ 5′ (III)
[0100] wherein:
[0101] i, j, k, and l are each independently 0 or 1;
[0102] each nₚ, n_{q}, and n_{q}′, each of which may or may not be present, independently represents an overhang nucleotide;
[0103] p, q, and q′ are each independently 0-6;
[0104] nₚ′>0 and at least one nₚ′ is linked to a neighboring nucleotide via a phosphorothioate linkage;
[0105] each Nₐ and Nₐ′ independently represents an oligonucleotide sequence comprising 0-25 nucleotides which are either modified or unmodified or combinations thereof, each sequence comprising at least two differently modified nucleotides;
[0106] each N_{b} and N_{b}′ independently represents an oligonucleotide sequence comprising 0-10 nucleotides which are either modified or unmodified or combinations thereof;
   [0107] XXX, YYY, ZZZ, X′X′X′, Y′Y′Y′, and Z′Z′Z′ each independently represent one motif of three identical modifications on three consecutive nucleotides, and wherein the modifications are 2′-O-methyl or 2′-fluoro modifications;
   [0108] modifications on N_{b} differ from the modification on Y and modifications on N_{b}′ differ from the modification on Y′;
   [0109] wherein the sense strand comprises at least one phosphorothioate linkage; and
[0110] wherein the sense strand is conjugated to at least one ligand, wherein the ligand is one or more GalNAc derivatives attached through a bivalent or trivalent branched linker.

[0111] In yet another aspect, the present invention provides RNAi agents, e.g., double stranded RNAi agents, capable of inhibiting the expression of TMPRSS6 (matriptase-2) in a cell, wherein the double stranded RNAi agent comprises a sense strand complementary to an antisense strand, wherein the antisense strand comprises a region complementary to part of an mRNA encoding TMPRSS6, wherein each strand is about 14 to about 30 nucleotides in length, wherein the double stranded RNAi agent is represented by formula (III):

sense: 5′ nₚ-Nₐ-Y Y Y-Nₐ-n_{q} 3′

antisense: 3′ nₚ′-Nₐ′-Y′Y′Y′-Nₐ′-n_{q}′ 5′ (IIIa)
[0112] wherein:
[0113] each nₚ, n_{q}, and n_{q}′, each of which may or may not be present, independently represents an overhang nucleotide;
[0114] p, q, and q′ are each independently 0-6;
[0115] nₚ′>0 and at least one nₚ′ is linked to a neighboring nucleotide via a phosphorothioate linkage;
[0116] each Nₐ and Nₐ′ independently represents an oligonucleotide sequence comprising 0-25 nucleotides which are either modified or unmodified or combinations thereof, each sequence comprising at least two differently modified nucleotides;
   [0117] YYY and Y′Y′Y′ each independently represent one motif of three identical modifications on three consecutive nucleotides, and wherein the modifications are 2′-O-methyl or 2′-fluoro modifications;
   [0118] wherein the sense strand comprises at least one phosphorothioate linkage; and
[0119] wherein the sense strand is conjugated to at least one ligand, wherein the ligand is one or more GalNAc derivatives attached through a bivalent or trivalent branched linker.

[0120] In one embodiment, the present invention provides RNAi agent selected from the group of RNAi agents listed in any one of Tables 1, 2, 4, 5, 8, 19, and 12.

[0121] In one aspect, the present invention provides compositions comprising a modified antisense polynucleotide agent, wherein the agent is capable of inhibiting the expression of TMPRSS6 in a cell, and comprises a sequence complementary to a sense sequence selected from the group of the sequences listed in any one of Tables 1, 2, 4, 5, 8, 10, and 12, wherein the polynucleotide is about 14 to about 30 nucleotides in length.

[0122] The present invention also provides cells, vectors, host cells, and pharmaceutical compositions comprising, e.g., the double stranded RNAi agents of the invention.

[0123] In some embodiments, the RNAi agent is administered using a pharmaceutical composition.

[0124] In preferred embodiments, the RNAi agent is administered in a solution. In some such embodiments, the siRNA is administered in an unbuffered solution. In one embodiment, the siRNA is administered in water. In other embodiments, the siRNA is administered with a buffer solution, such as an acetate buffer, a citrate buffer, a prolamine buffer, a carbonate buffer, or a phosphate buffer or any combination thereof. In some embodiments, the buffer solution is phosphate buffered saline (PBS).

[0125] In one embodiment, the pharmaceutical compositions further comprise a lipid formulation. In one embodiment, the lipid formulation comprises a LNP, or XTC. In another embodiment, the lipid formulation comprises a MC3.

[0126] In one aspect, the present invention provides methods of inhibiting TMPRSS6 expression in a cell. The methods include contacting the cell with an RNAi agent, e.g., a double stranded RNAi agent, or a modified antisense polynucleotide agent of the invention, or vector of the invention, or a pharmaceutical composition of the invention; and maintaining the cell produced in step (a) for a time sufficient to obtain degradation of the mRNA transcript of a TMPRSS6 gene, thereby inhibiting expression of the TMPRSS6 gene in the cell.

[0127] In one embodiment, the cell is within a subject.

[0128] In one embodiment, the subject is a human.

[0129] In one embodiment, the TMPRSS6 expression is inhibited by at least about 30%, 35%, 40%, 45%, 50%, 55%, 60%, 65%, 70%, 75%, 80%, 85%, 90%, 95%, 98%, or 100%.

[0130] In another embodiment, hepcidin gene expression is increased by at least about 1.5-fold, about 2-fold, about 3-fold, about 4-fold, or about 5-fold.

[0131] In yet another embodiment, serum hepcidin concentration is increased by at least about 10%, about 25%, about 50%, about 100%, about 150%, about 200%, about 250%, or about 300%.

[0132] In one embodiment, serum iron concentration is decreased by at least about 20%, about 30%, about 40%, about 50%, about 60%, about 70%, about 80%, about 90%, about 95%, about 98% or about 100%.

[0133] In another embodiment, a percent transferrin saturation is decreased by at least about 20%, about 30%, about 40%, about 50%, about 60%, about 70%, about 80%, about 90%, about 95%, about 98% or about 100%.

[0134] In another aspect, the present invention provides methods of treating a subject having a disorder mediated by, or associated with, TMPRSS6 expression. The methods include administering to the subject a therapeutically effective amount of an RNAi agent, e.g., a double stranded RNAi agent, of the invention, or a modified antisense polynucleotide agent of the invention, or a vector of the invention, or a pharmaceutical composition of the invention, thereby treating the subject.

[0135] In one aspect, the present invention provides methods of treating a subject having a TMPRSS6-associated disorder. The methods include subcutaneously administering to the subject a therapeutically effective amount of a double stranded RNAi agent,
[0136] wherein the double stranded RNAi agent comprises a sense strand and an antisense strand forming a double stranded region,
[0137] wherein the sense strand comprises at least 15 contiguous nucleotides differing by no more than 3 nucleotides from any one of the nucleotide sequences of SEQ ID NO:1, SEQ ID NO:2, or SEQ ID NO:3, SEQ ID NO:4, or SEQ ID NO:5, and the antisense strand comprises at least 15 contiguous nucleotides differing by no more than 3 nucleotides from any one of the nucleotide sequences of SEQ ID NO:6, SEQ ID NO:7, or SEQ ID NO:8, SEQ ID NO:9, or SEQ ID NO:10,
[0138] wherein substantially all of the nucleotides of the antisense strand comprise a modification selected from the group consisting of a 2′-O-methyl modification and a 2′-fluoro modification,
[0139] wherein the antisense strand comprises two phosphorothioate internucleotide linkages at the 5′-terminus and two phosphorothioate internucleotide linkages at the 3′-terminus,
[0140] wherein substantially all of the nucleotides of the sense strand comprise a modification selected from the group consisting of a 2′-O-methyl modification and a 2′-fluoro modification,
[0141] wherein the sense strand comprises two phosphorothioate internucleotide linkages at the 5′-terminus and,
[0142] wherein the sense strand is conjugated to one or more GalNAc derivatives attached through a branched bivalent or trivalent linker at the 3′-terminus, thereby treating the subject. In one embodiment, all of the nucleotides of the sense strand and all of the nucleotides of the antisense strand comprise a modification.

[0143] In one embodiment, the subject is a human.

[0144] In one embodiment, the subject has a disorder associated with iron overload, e.g., hereditary hemochromatosis, β-thalassemia (e.g., β-thalassemia major and β-thalassemia intermiedia) erythropoictic porphyria, Parkinson's Disease, Alzheimer's Disease or Friedreich's Ataxia.

[0145] In one embodiment, the RNAi agent, e.g., double stranded RNAi agent, is administered at a dose of about 0.01 mg/kg to about 10 mg/kg, about 1 mg/kg to about 10 mg/kg, about 2 mg/kg to about 10 mg/kg, about 3 mg/kg to about 10 mg/kg, about 4 mg/kg to about 10 mg/kg, about 5 mg/kg to about 15 mg/kg, about 6 mg/kg to about 15 mg/kg, about 7 mg/kg to about 15 mg/kg, about 8 mg/kg to about 15 mg/kg, about 9 mg/kg to about 15 mg/kg, about 10 mg/kg to about 20 mg/kg, about 12 mg/kg to about 20 mg/kg, about 13 mg/kg to about 20 mg/kg, about 14 mg/kg to about 20 mg/kg, about 15 mg/kg to about 20 mg/kg, about 16 mg/kg to about 20 mg/kg or about 18 mg/kg to about 20 mg/kg. In particular embodiments, the double stranded RNAi agent is administered at a dose of about 0.1 mg/kg, about 1.0 mg/kg, or about 3.0 mg/kg.

[0146] In one embodiment, the RNAi agent, e.g., double stranded RNAi agent, is administered subcutaneously or intravenously.

[0147] In one embodiment, the RNAi agent is administered in two or more doses. In a specific embodiment, the RNAi agent is administered at intervals selected from the group consisting of once every about 12 hours, once every about 24 hours, once every about 48 hours, once every about 72 hours, once every about 96 hours, once about every 7 days, or once about every 14 days. In particular embodiments, the RNAi agent is administered once a week for up to 2 weeks, up to 3 weeks, up to 4 weeks, up to 5 weeks, or longer.

[0148] In yet another aspect, the present invention provides methods of treating an iron overload associated disorder in a subject. The methods include administering to the subject a therapeutically effective amount of an RNAi agent, e.g., a double stranded RNAi agent, or the vector of the invention, thereby treating the subject.

[0149] In one embodiment, the iron overload associated disorder is hemochromatosis. In another embodiment, the iron overload associated disorder is a thalassemia, e.g., β-thalassemia (e.g., β-thalassemia major and β-thalassemia intermiedia), or erythropoietic porphyria. In yet another embodiment, the iron overload associated disorder is a neurological disease, e.g., Parkinson's Diascase, Alzheimer's Disease or Friedreich's Ataxia.

[0150] In one embodiment, the subject is a primate or rodent. In another embodiment, the subject is a human.

[0151] In one embodiment, the RNAi agent, e.g., double stranded RNAi agent, is administered at a dose of about 0.01 mg/kg to about 10 mg/kg, about 0.5 mg/kg to about 50 mg/kg, about 10 mg/kg to about 30 mg/kg, about 10 mg/kg to about 20 mg/kg, about 15 mg/kg to about 20 mg/kg, about 15 mg/kg to about 25 mg/kg, about 15 mg/kg to about 30 mg/kg, or about 20 mg/kg to about 30 mg/kg.

[0152] In one embodiment, the RNAi agent, e.g., double stranded RNAi agent, is administered subcutaneously or intravenously.

[0153] In one embodiment, the RNAi agent is administered in two or more doses. In a specific embodiment, the RNAi agent is administered at intervals selected from the group consisting of once every about 12 hours, once every about 24 hours, once every about 48 hours, once every about 72 hours, once every about 96 hours, once about every 7 days, or once about every 14 days.

[0154] In one embodiment, administering results in a decrease in iron levels, ferritin level and/or transferrin saturation level in the subject.

[0155] In one embodiment, the methods further comprise determining the iron level in the subject.

[0156] In one embodiment, the methods of the invention which include administering an iRNA agent of the invention (or pharmaceutical composition of the invention) to a subject are practiced in combination with administration of additional pharmaceuticals and/or other therapeutic methods. In one embodiment, the methods of the invention further comprise administering an iron chelator, e.g., deferiprone, deferoxamine, and deferasirox, to a subject.

[0157] The present invention is further illustrated by the following detailed description and drawings.

### BRIEF DESCRIPTION OF THE DRAWINGS

[0158] FIG. 1 is a graph showing relative levels of TMPRSS6 mRNA in the liver of wild-type mice following administration of a single dose of 1 mg/kg, 3 mg/kg or 10 mg/kg of the iRNA agent AD-59743.

[0159] FIG. 2 is a graph showing relative levels of hepcidin mRNA in the liver of wild-type mice following administration of a single dose of 1 mg/kg, 3 mg/kg or 10 mg/kg of the iRNA agent AD-59743.

[0160] FIG. 3A is a graph showing the levels of hepatic TMPRSS6 mRNA in C57BL/6 mice at various time points following a single subcutaneous injection of AD-60940 at a dose of 0.3 mg/kg, 1.0 mg/kg or 3.0 mg/kg, or PBS alone (control). Each data point represents the mean value from three mice. The standard deviation of the mean is represented by error bars.

[0161] FIG. 3B is a graph showing the levels of hepatic hepcidin mRNA in C57BL/6 mice at various time points following a single subcutaneous injection of AD-60940 at a dose of 0.3 mg/kg, 1.0 mg/kg or 3.0 mg/kg, or PBS alone (control). Each data point represents the mean value from three mice. The standard deviation of the mean is represented by error bars.

[0162] FIG. 3C is a graph showing the levels of serum hepcidin in C57BL/6 mice at various time points following a single subcutaneous injection of AD-60940 at a dose of 0.3 mg/kg, 1.0 mg/kg or 3.0 mg/kg, or PBS alone (control). Each data point represents the mean value from three mice. The standard deviation of the mean is represented by error bars.

[0163] FIG. 3D is a graph showing the levels of total serum iron in C57BL/6 mice at various time points following a single subcutaneous injection of AD-60940 at a dose of 0.3 mg/kg, 1.0 mg/kg or 3.0 mg/kg, or PBS alone (control). Each data point represents the mean value from three mice. The standard deviation of the mean is represented by error bars.

[0164] FIG. 3E is a graph showing the percent transferrin saturation (FIG. 3E) in C57BL/6 mice at various time points following a single subcutaneous injection of AD-60940 at a dose of 0.3 mg/kg, 1.0 mg/kg or 3.0 mg/kg, or PBS alone (control). Each data point represents the mean value from three mice. The standard deviation of the mean is represented by error bars.

[0165] FIG. 3F is a graph demonstrating the relative hepatic TMPRSS6 mRNA concentration as a function of AD-60940 dose at 11 days following administration. Each data point represents the maximum suppression of TMPRSS6 mRNA concentration observed at each dose level. The data were fit to the Hill equation.

[0166] FIG. 4A is a schematic depicting the administration regimen of one dose per week for three weeks followed by sacrifice of the mice at day 21. FIG. 4B is a graph showing the levels of hepatic TMPRSS6 mRNA, hepatic hepcidin mRNA, and percent transferrin saturation in C57BL/6 mice administered a subcutaneous injection of AD-60940 at a dose of 0.3 mg/kg, 1.0 mg/kg, or PBS (control) according to the regimen shown in FIG. 4A. Each bar represents the mean value from three mice. The standard deviation of the mean is represented by error bars. FIG. 4C demonstrates the relative hepatic TMPRSS6 mRNA concentration as a function of AD-60940 dose. The data were fit to the Hill equation.

[0167] FIG. 5A is a graph showing the relationship between serum hepcidin concentration and relative TMPRSS6 mRNA levels.

[0168] FIG. 5B is a graph showing the relationship between percent transferrin saturation and relative TMPRSS6 mRNA levels.

[0169] FIG. 5C is a graph showing the relationship between serum hepcidin concentration and relative hepcidin mRNA levels.

[0170] FIG. 5D is a graph showing the relationship between percent transferrin saturation and scrum hepcidin concentration.

[0171] FIG. 6 is a graph showing relative levels of TMPRSS6 mRNA in the liver of C57BL/6 mice following administration of a single subcutaneous dose of 3 mg/kg of the indicated iRNA agent or PBS (control). The bars represent the mean from three mice and the error bars represent the standard deviation of the mean.

[0172] FIG. 7 is a graph showing relative levels of TMPRSS6 mRNA in the liver of C57BL/6 mice following a subcutaneous dose of 0.3 mg/kg or 1.0 mg/kg of the indicated iRNA agent, or PBS (control), once a week for three weeks. The bars represent the mean from three mice and the error bars represent the standard deviation of the mean.

[0173] FIG. 8 shows the nucleotide sequence of Homo sapiens TMPRSS6 (SEQ ID NO:1).

[0174] FIG. 9 shows the nucleotide sequence of Mus musculus TMPRSS6 (SEQ ID NO:2).

[0175] FIG. 10 shows the nucleotide sequence of Rattus norvegicus TMPRSS6 (SEQ ID NO:3).

[0176] FIG. 11 shows the nucleotide sequence of Macaca mulatta TMPRSS6 (SEQ ID NO:4).

[0177] FIG. 12 shows the nucleotide sequence of Macaca mulatta TMPRSS6 (SEQ ID NO:5).

[0178] FIG. 13 shows the reverse complement of SEQ ID NO:1 (SEQ ID NO:6).

[0179] FIG. 14 shows the reverse complement of SEQ ID NO:2 (SEQ ID NO:7).

[0180] FIG. 15 shows the reverse complement of SEQ ID NO:3 (SEQ ID NO:8).

[0181] FIG. 16 shows the reverse complement of SEQ ID NO:4 (SEQ ID NO:9).

[0182] FIG. 17 shows the reverse complement of SEQ ID NO:5 (SEQ ID NO:10).

### DETAILED DESCRIPTION OF THE INVENTION

[0183] The present invention provides compositions comprising RNAi agents, e.g., double-stranded iRNA agents, targeting TMPRSS6. The present invention also provides methods using the compositions of the invention for inhibiting TMPRSS6 expression and for treating TMPRSS6 associated disorders, e.g., β-thalassemia or hemochromatosis.

[0184] TMPRSS6 plays an important role in iron homeostasis as an inhibitor of HAMP gene expression. The HAMP gene encodes the liver hormone hepcidin, which is a central regulator of iron homeostasis. Hepcidin binds to the iron exporter protein ferroportin (FPN1), which is localized mainly on absorptive enterocytes, hepatocytes and macrophages. Hepcidin binding to the extracellular domain of ferroportin leads to the internalization and degradation of ferroportin, thus decreasing the absorption of dietary iron from the intestine, and the release of iron from macrophages and hepatocytes. HAMP gene expression can be stimulated in response to iron through Bone Morphogenetic Protein (BMP)/Sons of Mothers Against Decapentaplegic (SMAD)-dependent signal transduction cascade mediated by the BMP-co-receptor hemojuvelin (HJV). The key role of TMPRSS6 in HAMP regulation is in the inhibition of BMP-mediated HAMP upregulation. TMPRSS6 inhibits BMP-mediated HAMP upregulation by cleaving the BMP co-receptor HJV, which is essential for BMP-mediated HAMP upregulation; thus preventing BMP signaling, SMAD translocation to the nucleus, and HAMP transcriptional activation.

[0185] Several human and mouse studies have confirmed the role of TMPRSS6 in HAMP regulation and iron homeostasis (Du et al. Science 2008, Vol. 320, U.S. Plant Pat. No. 1,088-1092; Folgueras et al. Blood 2008, Vol. 112, U.S. Plant Pat. No. 2,539-45). Studies have shown that loss of function mutations in TMPRSS6 can lead to the upregulation of hepcidin expression, causing an inherited iron deficiency anemia called iron refractory iron deficiency anemia (IRIDA) (Finberg. Seminars in Hematology 2009, Vol. 46, pp378-86), which is characterized by elevated hepcidin levels, hypochromic microcytic anemia, low mean corpuscular volume (MCV), low transferrin saturation, poor absorption of oral iron, and incomplete response to parenteral iron. However, loss of function mutations in positive regulators of HAMP (e.g., BMP1, BMP4, and HFE) have been shown to downregulate hepcidin expression and cause iron overload disorders (Milet et al. Am J Hum Gen 2007, Vol. 81, pp799-807; Finberg et al. Blood 2011, Vol. 117, U.S. Plant Pat. No. 4,590-9). In the primary iron overload disorders, collectively called hereditary hemochromatosis (HH), in anemias characterized by massive ineffective hematopoiesis, and in iron overload (secondary hemochromatosis), such as β-thalassemia intermedia (TI), hepcidin levels are low despite elevated serum iron concentrations and iron stores. A mouse model of β-thalassemia intermedia has demonstrated that the loss of TMPRSS6 expression leads to elevated levels of hepcidin (Finberg 2010 Oral Presentation: “TMPRSS6, an inhibitor of Hepatic BMP/Smad Signaling, is required for Hepcidin Suppression and Iron Loading in a Mouse Model of β-Thalassemia.” American Society of Hematology Annual Meeting 2010, Abstract No.: 164).

[0186] The present invention describes iRNA agents, compositions and methods for modulating the expression of a TMPRSS6 gene. In certain embodiments, expression of TMPRSS6 is reduced or inhibited using a TMPRSS6-specific iRNA agent, thereby leading to increase HAMP expression, and decreased serum iron levels. Thus, inhibition of TMPRSS6 gene expression or activity using the iRNA compositions featured in the invention can be a useful approach to therapies aimed at reducing the iron levels in a subject. Such inhibition can be useful for treating iron overload associated disorders, such as hemochromatosis or thalassemia, e.g., β-thalassemia (e.g., β-thalassemia major and β-thalassemia intermiedia).

### I. Definitions

[0187] In order that the present invention may be more readily understood, certain terms are first defined. In addition, it should be noted that whenever a value or range of values of a parameter are recited, it is intended that values and ranges intermediate to the recited values are also intended to be part of this invention.

[0188] The articles “a” and “an” are used herein to refer to one or to more than one (i.e., to at least one) of the grammatical object of the article. By way of example, “an element” means one element or more than one element, e.g., a plurality of elements.

[0189] The term “including” is used herein to mean, and is used interchangeably with, the phrase “including but not limited to”.

[0190] The term “or” is used herein to mean, and is used interchangeably with, the term “and/or,” unless context clearly indicates otherwise.

[0191] As used herein, “TMPRSS6” refers to the type II plasma membrane serine protease (TTSP) gene or protein. TMPRSS6 is also known as matriptase-2, IRIDA (iron refractory iron-deficiency anemia), transmembrane protease serine 6, type II transmembrane serine protease 6, and membrane-bound mosaic serine proteinase matriptase-2. TMPRSS6 is a serine protease Type II transmembrane protein of approximately 899 amino acids in length. TMPRSS6 contains multiple domains, e.g., a short endo domain, a transmembrane domain, a sea urchin sperm protein/enteropeptidase domain/agrin (SEA) domain, two complement factor/urchin embryonic growth factor/BMP domains (CUB), three LDL-R class a domains (LDLa), and a trypsin-like serine protease domain with conserved His-Asp-Ser triad (HDS). The term “TMPRSS6” includes human TMPRSS6, the amino acid and nucleotide sequence of which may be found in, for example, GenBank Accession No. GI:56682967; mouse TMPRSS6, the amino acid and nucleotide sequence of which may be found in, for example, GenBank Accession No. GI:125656151; rat TMPRSS6, the amino acid and nucleotide sequence of which may be found in, for example, GenBank Accession No. GI: 194474097; rhesus TMPRSS6, the amino acid and nucleotide sequence of which may be found in, for example, GenBank Accession No. XM_001085203.2 (GI:297260989) and XM_001085319.1 (GI:109094061). Additional examples of AGT mRNA sequences are readily available using publicly available databases, e.g., GenBank, UniProt, OMIM, and the Macaca genome project web site.

[0192] The term“TMPRSS6,” as used herein, also refers to naturally occurring DNA sequence variations of the TMPRSS6 gene, such as a single nucleotide polymorphism (SNP) in the TMPRSS6 gene. Exemplary SNPs may be found in the dbSNP database available at www.ncbi.nim.nih.gov/projects/SNP.

[0193] As used herein, “target sequence” refers to a contiguous portion of the nucleotide sequence of an mRNA molecule formed during the transcription of a TMPRSS6 gene, including mRNA that is a product of RNA processing of a primary transcription product.

[0194] As used herein, the term “strand comprising a sequence” refers to an oligonucleotide comprising a chain of nucleotides that is described by the sequence referred to using the standard nucleotide nomenclature.

[0195] “G,” “C,” “A” and “U” each generally stand for a nucleotide that contains guanine, cytosine, adenine, and uracil as a base, respectively. “T” and “dT” are used interchangeably herein and refer to a deoxyribonucleotide wherein the nucleobase is thymine, e.g., deoxyribothymine, 2′-deoxythymidine or thymidine. However, it will be understood that the term “ribonucleotide” or “nucleotide” or “deoxyribonucleotide” can also refer to a modified nucleotide, as further detailed below, or a surrogate replacement moiety. The skilled person is well aware that guanine, cytosine, adenine, and uracil may be replaced by other moieties without substantially altering the base pairing properties of an oligonucleotide comprising a nucleotide bearing such replacement moiety. For example, without limitation, a nucleotide comprising inosine as its base may base pair with nucleotides containing adenine, cytosine, or uracil. Hence, nucleotides containing uracil, guanine, or adenine may be replaced in the nucleotide sequences of the invention by a nucleotide containing, for example, inosine. Sequences comprising such replacement moieties are embodiments of the invention.

[0196] The terms “IRNA”, “RNAi agent,” “iRNA agent,”, “RNA interference agent” as used interchangeably herein, refer to an agent that contains RNA as that term is defined herein, and which mediates the targeted cleavage of an RNA transcript via an RNA-induced silencing complex (RISC) pathway. iRNA directs the sequence-specific degradation of mRNA through a process known as RNA interference (RNAi). The iRNA modulates, e.g., inhibits, the expression of TMPRSS6 in a cell, e.g., a cell within a subject, such as a mammalian subject.

[0197] In one embodiment, an RNAi agent of the invention includes a single stranded RNA that interacts with a target RNA sequence, e.g., a TMPRSS6 target mRNA sequence, to direct the cleavage of the target RNA. Without wishing to be bound by theory, it is believed that long double stranded RNA introduced into cells is broken down into siRNA by a Type III endonuclease known as Dicer (Sharp et al. (2001) Genes Dev. 15:485). Dicer, a ribonuclease-III-like enzyme, processes the dsRNA into 19-23 base pair short interfering RNAs with characteristic two base 3′ overhangs (Bernstein, et al., (2001) Nature 409:363). The siRNAs are then incorporated into an RNA-induced silencing complex (RISC) where one or more helicases unwind the siRNA duplex, enabling the complementary antisense strand to guide target recognition (Nykanen, et al., (2001) Cell 107:309). Upon binding to the appropriate target mRNA, one or more endonucleases within the RISC cleave the target to induce silencing (Elbashir, et al., (2001) Genes Dev. 15:188). Thus, in one aspect the invention relates to a single stranded RNA (siRNA) generated within a cell and which promotes the formation of a RISC complex to effect silencing of the target gene, i.e., a TMPRSS6 gene. Accordingly, the term “siRNA” is also used herein to refer to an RNAi as described above.

[0198] In another embodiment, the RNAi agent may be a single-stranded siRNA that is introduced into a cell or organism to inhibit a target mRNA. Single-stranded RNAi agents bind to the RISC endonuclease Argonaute 2, which then cleaves the target mRNA. The single-stranded siRNAs are generally 15-30 nucleotides and are chemically modified. The design and testing of single-stranded siRNAs are described in U.S. Pat. No. 8,101,348 and in Lima et al., (2012) Cell 150: 883-894, the entire contents of each of which are hereby incorporated herein by reference. Any of the antisense nucleotide sequences described herein may be used as a single-stranded siRNA as described herein or as chemically modified by the methods described in Lima et al., (2012) Cell 150; 883-894.

[0199] In yet another embodiment, the present invention provides single-stranded antisense oligonucleotide molecules targeting TMPRSS6. A “single-stranded antisense oligonucleotide molecule” is complementary to a sequence within the target mRNA (i.e., TMPRSS6). Single-stranded antisense oligonucleotide molecules can inhibit translation in a stoichiometric manner by base pairing to the mRNA and physically obstructing the translation machinery, see Dias, N. et al., (2002) Mol Cancer Ther 1:347-355. Alternatively, the single-stranded antisense oligonucleotide molecules inhibit a target mRNA by hydridizing to the target and cleaving the target through an RNaseH cleavage event. The single-stranded antisense oligonucleotide molecule may be about 10 to about 30 nucleotides in length and have a sequence that is complementary to a target sequence. For example, the single-stranded antisense oligonucleotide molecule may comprise a sequence that is at least about 10, 11, 12, 13, 14, 15, 16, 17, 18, 19, 20, or more contiguous nucleotides from any one of the antisense nucleotide sequences described herein, e.g., the sequences provided in any one of Tables, 1, 2, 4, 5, 8, 10, and 12, or bind any of the target sites described herein. The single-stranded antisense oligonucleotide molecules may comprise modified RNA, DNA, or a combination thereof.

[0200] In another embodiment, an “IRNA” for use in the compositions, uses, and methods of the invention is a double-stranded RNA and is referred to herein as a “double stranded RNAi agent,” “double-stranded RNA (dsRNA) molecule,” “dsRNA agent,” or “dsRNA”. The term “dsRNA”, refers to a complex of ribonucleic acid molecules, having a duplex structure comprising two anti-parallel and substantially complementary nucleic acid strands, referred to as having “sense” and “antisense” orientations with respect to a target RNA, i.e., a TMPRSS6 gene. In some embodiments of the invention, a double-stranded RNA (dsRNA) triggers the degradation of a target RNA, e.g., an mRNA, through a post-transcriptional gene-silencing mechanism referred to herein as RNA interference or RNAi.

[0201] In general, the majority of nucleotides of each strand of a dsRNA molecule are ribonucleotides, but as described in detail herein, each or both strands can also include one or more non-ribonucleotides, e.g., a deoxyribonucleotide and/or a modified nucleotide. In addition, as used in this specification, an “RNAi agent” may include ribonucleotides with chemical modifications; an RNAi agent may include substantial modifications at multiple nucleotides. Such modifications may include all types of modifications disclosed herein or known in the art. Any such modifications, as used in a siRNA type molecule, are encompassed by “RNAi agent” for the purposes of this specification and claims.

[0202] The two strands forming the duplex structure may be different portions of one larger RNA molecule, or they may be separate RNA molecules. Where the two strands are part of one larger molecule, and therefore are connected by an uninterrupted chain of nucleotides between the 3′-end of one strand and the 5′-end of the respective other strand forming the duplex structure, the connecting RNA chain is referred to as a “hairpin loop.” Where the two strands are connected covalently by means other than an uninterrupted chain of nucleotides between the 3′-end of one strand and the 5′-end of the respective other strand forming the duplex structure, the connecting structure is referred to as a “linker.” The RNA strands may have the same or a different number of nucleotides. The maximum number of base pairs is the number of nucleotides in the shortest strand of the dsRNA minus any overhangs that are present in the duplex. In addition to the duplex structure, an RNAi agent may comprise one or more nucleotide overhangs.

[0203] In one embodiment, an RNAi agent of the invention is a dsRNA of 24-30 nucleotides that interacts with a target RNA sequence, e.g., a TMPRSS6 target mRNA sequence, to direct the cleavage of the target RNA. Without wishing to be bound by theory, long double stranded RNA introduced into cells is broken down into siRNA by a Type III endonuclease known as Dicer (Sharp et al. (2001) Genes Dev. 15:485). Dicer, a ribonuclease-III-like enzyme, processes the dsRNA into 19-23 base pair short interfering RNAs with characteristic two base 3′ overhangs (Bernstein, et al., (2001) Nature 409:363). The siRNAs are then incorporated into an RNA-induced silencing complex (RISC) where one or more helicases unwind the siRNA duplex, enabling the complementary antisense strand to guide target recognition (Nykanen, et al., (2001) Cell 107:309). Upon binding to the appropriate target mRNA, one or more endonucleases within the RISC cleave the target to induce silencing (Elbashir, et al., (2001) Genes Dev. 15:188).

[0204] As used herein, a “nucleotide overhang” refers to the unpaired nucleotide or nucleotides that protrude from the duplex structure of an RNAi agent when a 3′-end of one strand of the RNAi agent extends beyond the 5′-end of the other strand, or vice versa. “Blunt” or “blunt end” means that there are no unpaired nucleotides at that end of the double stranded RNAi agent, i.e., no nucleotide overhang. A “blunt ended” RNAi agent is a dsRNA that is double-stranded over its entire length, i.e., no nucleotide overhang at either end of the molecule. The RNAi agents of the invention include RNAi agents with nucleotide overhangs at one end (i.e., agents with one overhang and one blunt end) or with nucleotide overhangs at both ends.

[0205] The term “antisense strand” refers to the strand of a double stranded RNAi agent which includes a region that is substantially complementary to a target sequence (e.g., a human TMPRSS6 mRNA). As used herein, the term “region complementary to part of an mRNA encoding transthyretin” refers to a region on the antisense strand that is substantially complementary to part of a TMPRSS6 mRNA sequence. Where the region of complementarity is not fully complementary to the target sequence, the mismatches are most tolerated in the terminal regions and, if present, are generally in a terminal region or regions, e.g., within 6, 5, 4, 3, or 2 nucleotides of the 5′ and/or 3′ terminus.

[0206] The term “sense strand,” as used herein, refers to the strand of a dsRNA that includes a region that is substantially complementary to a region of the antisense strand.

[0207] As used herein, the term “cleavage region” refers to a region that is located immediately adjacent to the cleavage site. The cleavage site is the site on the target at which cleavage occurs. In some embodiments, the cleavage region comprises three bases on either end of, and immediately adjacent to, the cleavage site. In some embodiments, the cleavage region comprises two bases on either end of, and immediately adjacent to, the cleavage site. In some embodiments, the cleavage site specifically occurs at the site bound by nucleotides 10 and 11 of the antisense strand, and the cleavage region comprises nucleotides 11, 12 and 13.

[0208] As used herein, and unless otherwise indicated, the term “complementary,” when used to describe a first nucleotide sequence in relation to a second nucleotide sequence, refers to the ability of an oligonucleotide or polynucleotide comprising the first nucleotide sequence to hybridize and form a duplex structure under certain conditions with an oligonucleotide or polynucleotide comprising the second nucleotide sequence, as will be understood by the skilled person. Such conditions can, for example, be stringent conditions, where stringent conditions may include: 400 mM NaCl, 40 mM PIPES pH 6.4, 1 mM EDTA, 50° C. or 70° C. for 12-16 hours followed by washing. Other conditions, such as physiologically relevant conditions as may be encountered inside an organism, can apply. For example, a complementary sequence is sufficient to allow the relevant function of the nucleic acid to proceed, e.g., RNAi. The skilled person will be able to determine the set of conditions most appropriate for a test of complementarity of two sequences in accordance with the ultimate application of the hybridized nucleotides.

[0209] Sequences can be “fully complementary” with respect to each when there is base-pairing of the nucleotides of the first nucleotide sequence with the nucleotides of the second nucleotide sequence over the entire length of the first and second nucleotide sequences. However, where a first sequence is referred to as “substantially complementary” with respect to a second sequence herein, the two sequences can be fully complementary, or they may form one or more, but generally not more than 4, 3 or 2 mismatched base pairs upon hybridization, while retaining the ability to hybridize under the conditions most relevant to their ultimate application. However, where two oligonucleotides are designed to form, upon hybridization, one or more single stranded overhangs, such overhangs shall not be regarded as mismatches with regard to the determination of complementarity. For example, a dsRNA comprising one oligonucleotide 21 nucleotides in length and another oligonucleotide 23 nucleotides in length, wherein the longer oligonucleotide comprises a sequence of 21 nucleotides that is fully complementary to the shorter oligonucleotide, may yet be referred to as “fully complementary” for the purposes described herein.

[0210] “Complementary” sequences, as used herein, may also include, or be formed entirely from, non-Watson-Crick base pairs and/or base pairs formed from non-natural and modified nucleotides, in as far as the above requirements with respect to their ability to hybridize are fulfilled. Such non-Watson-Crick base pairs includes, but not limited to, G:U Wobble or Hoogstein base pairing.

[0211] The terms “complementary,” “fully complementary” and “substantially complementary” herein may be used with respect to the base matching between the sense strand and the antisense strand of a dsRNA, or between the antisense strand of a dsRNA and a target sequence, as will be understood from the context of their use.

[0212] As used herein, a polynucleotide that is “substantially complementary to at least part of” a messenger RNA (mRNA) refers to a polynucleotide that is substantially complementary to a contiguous portion of the mRNA of interest (e.g., an mRNA encoding TMPRSS6) including a 5′ UTR, an open reading frame (ORF), or a 3′ UTR. For example, a polynucleotide is complementary to at least a part of a TMPRSS6 mRNA if the sequence is substantially complementary to a non-interrupted portion of an mRNA encoding TMPRSS6.

[0213] The term “inhibiting,” as used herein, is used interchangeably with “reducing,” “silencing,” “downregulating,” “suppressing” and other similar terms, and includes any level of inhibition.

[0214] The phrase “inhibiting expression of a TMPRSS6,” as used herein, includes inhibition of expression of any TMPRSS6 gene (such as, e.g., a mouse TMPRSS6 gene, a rat TMPRSS6 gene, a monkey TMPRSS6 gene, or a human TMPRSS6 gene) as well as variants, (e.g., naturally occurring variants), or mutants of a TMPRSS6 gene. Thus, the TMPRSS6 gene may be a wild-type TMPRSS6 gene, a mutant TMPRSS6 gene, or a transgenic TMPRSS6 gene in the context of a genetically manipulated cell, group of cells, or organism.

[0215] “Inhibiting expression of a TMPRSS6 gene” includes any level of inhibition of a TMPRSS6 gene, e.g., at least partial suppression of the expression of a TMPRSS6 gene, such as an inhibition of at least about 5%, at least about 10%, at least about 15%, at least about 20%, at least about 25%, at least about 30%, at least about 35%, at least about 40%, at least about 45%, at least about 50%, at least about 55%, at least about 60%, at least about 65%, at least about 70%, at least about 75%, at least about 80%, at least about 85%, at least about 90%, at least about 91%, at least about 92%, at least about 93%, at least about 94%, at least about 95%, at least about 96%, at least about 97%, at least about 98%, or at least about 99%.

[0216] The expression of a TMPRSS6 gene may be assessed based on the level of any variable associated with TMPRSS6 gene expression, e.g., TMPRSS6 mRNA level, TMPRSS6 protein level, hepcidin mRNA level, hepcidin protein level, or iron levels in tissues or serum. Inhibition may be assessed by a decrease in an absolute or relative level of one or more of these variables compared with a control level. The control level may be any type of control level that is utilized in the art, e.g., a pre-dose baseline level, or a level determined from a similar subject, cell, or sample that is untreated or treated with a control (such as, e.g., buffer only control or inactive agent control).

[0217] The phrase “contacting a cell with a double stranded RNAi agent,” as used herein, includes contacting a cell by any possible means. Contacting a cell with a double stranded RNAi agent includes contacting a cell in vitro with the RNAi agent or contacting a cell in vivo with the RNAi agent. The contacting may be done directly or indirectly. Thus, for example, the RNAi agent may be put into physical contact with the cell by the individual performing the method, or alternatively, the RNAi agent may be put into a situation that will permit or cause it to subsequently come into contact with the cell.

[0218] Contacting a cell in vitro may be done, for example, by incubating the cell with the RNAi agent. Contacting a cell in vivo may be done, for example, by injecting the RNAi agent into or near the tissue where the cell is located, or by injecting the RNAi agent into another area, the bloodstream or the subcutaneous space, such that the agent will subsequently reach the tissue where the cell to be contacted is located. For example, the RNAi agent may contain and/or be coupled to a ligand, e.g., a GalNAc3 ligand, that directs the RNAi agent to a site of interest, e.g., the liver. Combinations of in vitro and in vivo methods of contacting are also possible. In connection with the methods of the invention, a cell might also be contacted in vitro with an RNAi agent and subsequently transplanted into a subject.

[0219] A “patient” or “subject,” as used herein, is intended to include either a human or non-human animal, preferably a mammal, e.g., human or a monkey. Most preferably, the subject or patient is a human.

[0220] A “TMPRSS6 associated disorder”, as used herein, is intended to include any disorder that can be treated or prevented, or the symptoms of which can be alleviated, by inhibiting the expression of TMPRSS6. In some embodiments, the TMPRSS6 associated disorder is also associated with iron overload, a condition characterized by elevated iron levels, or iron dysregulation. Iron overload may be caused, for example, by hereditary conditions, by elevated iron uptake from diet, or by excess iron administered parenterally that includes intravenous injection of excess iron, and transfusional iron overload.

[0221] TMPRSS6 associated disorders include, but are not limited to, hereditary hemochromatosis, idiopathic hemochromatosis, primary hemochromatosis, secondary hemochromatosis, severe juvenile hemochromatosis, neonatal hemochromatosis, sideroblastic anemia, hemolytic anemia, dyserythropoietic anemia, sickle-cell anemia, hemoglobinopathy, thalassemia (e.g., β-thalassemia and α-thalassemia), chronic liver diseases, porphyria cutanca tarda, erythropoictic porphyria, atransferrinemia, hereditary tyrosinemia, cerebrohepatorenal syndrome, idiopathic pulmonary hemosiderosis, renal hemosiderosis.

[0222] TMPRSS6 associated disorders include disorders associated with oral administration of excess iron, transfusional iron overload and intravenous injection of excess iron.

[0223] TMPRSS6 associated disorders also include disorders with symptoms that are associated with or may be caused by iron overload. Such symptoms include increased risk for liver disease (cirrhosis, cancer), heart attack or heart failure, diabetes mellitus, osteoarthritis, osteoporosis, metabolic syndrome, hypothyroidism, hypogonadism, and in some cases premature death. In one embodiment, TMPRSS6 associated disorders include neurodegenerative disorders associated with iron overload and/or iron dysregulation, such as Alzheimer's Disease, Parkinson's Disease, Huntington's Disease, Friedreich's Ataxia, epilepsy and multiple sclerosis. Administration of an iRNA that targets TMPRSS6, e.g., an iRNA described in any one of Tables 1, 2, 4, 5, 8, 10, and 12 can treat one or more of these symptoms, or prevent the development or progression of a disease or disorder that is aggravated by increased iron levels.

[0224] In one embodiment, a TMPRSS6 associated disorder is a β-thalassemia. A β-thalassemia is any one of a group of hereditary disorders characterized by a genetic deficiency in the synthesis of beta-globin chains. In the homozygous state, beta thalassemia (“thalassemia major”) causes severe, transfusion-dependent anemia. In the heterozygous state, the beta thalassemia trait (“thalassemia minor”) causes mild to moderate microcytic anemia.

[0225] “Thalassemia intermedia” is a β-thalassemia that results in subjects in whom the clinical severity of the disease is somewhere between the mild symptoms of β-thalassemia minor and the β-thalassemia major. The diagnosis is a clinical one that is based on the patient maintaining a satisfactory hemoglobin (Hb) level of at least 6-7 g/dL at the time of diagnosis without the need for regular blood transfusions.

[0226] In one embodiment, a β-thalassemia is thalassemia major. In another embodiment, a β-thalassemia is thalassemia intermedia.

[0227] “Therapeutically effective amount,” as used herein, is intended to include the amount of an RNAi agent that, when administered to a patient for treating a TMPRSS6 associated disease, is sufficient to effect treatment of the disease (e.g., by diminishing, ameliorating or maintaining the existing disease or one or more symptoms of disease). The “therapeutically effective amount” may vary depending on the RNAi agent, how the agent is administered, the disease and its severity and the history, age, weight, family history, genetic makeup, stage of pathological processes mediated by TMPRSS6 expression, the types of preceding or concomitant treatments, if any, and other individual characteristics of the patient to be treated.

[0228] “Prophylactically effective amount,” as used herein, is intended to include the amount of an RNAi agent that, when administered to a subject who does not yet experience or display symptoms of a TMPRSS6-associated disease, but who may be predisposed to the disease, is sufficient to prevent or ameliorate the disease or one or more symptoms of the disease. Ameliorating the disease includes slowing the course of the disease or reducing the severity of later-developing disease. The “prophylactically effective amount” may vary depending on the RNAi agent, how the agent is administered, the degree of risk of disease, and the history, age, weight, family history, genetic makeup, the types of preceding or concomitant treatments, if any, and other individual characteristics of the patient to be treated.

[0229] A “therapeutically-effective amount” or “prophylacticaly effective amount” also includes an amount of an RNAi agent that produces some desired local or systemic effect at a reasonable benefit/risk ratio applicable to any treatment. RNAi gents employed in the methods of the present invention may be administered in a sufficient amount to produce a reasonable benefit/risk ratio applicable to such treatment.

[0230] The term “sample,” as used herein, includes a collection of similar fluids, cells, or tissues isolated from a subject, as well as fluids, cells, or tissues present within a subject. Examples of biological fluids include blood, serum and serosal fluids, plasma, cerebrospinal fluid, ocular fluids, lymph, urine, saliva, and the like. Tissue samples may include samples from tissues, organs or localized regions. For example, samples may be derived from particular organs, parts of organs, or fluids or cells within those organs. In certain embodiments, samples may be derived from the liver (e.g., whole liver or certain segments of liver or certain types of cells in the liver, such as, e.g., hepatocytes). In preferred embodiments, a “sample derived from a subject” refers to blood or plasma drawn from the subject. In further embodiments, a “sample derived from a subject” refers to liver tissue (or subcomponents thereof) derived from the subject.

### II. iRNAs of the Invention

[0231] Described herein are improved double-stranded RNAi agents which inhibit the expression of a TMPRSS6 gene in a cell, such as a cell within a subject, e.g., a mammal, such as a human having a TMPRSS6 associated disorder, e.g., β-thalassemia (e.g., β-thalassemia major and β-thalassemia intermiedia) or hemochromatosis, and uses of such double-stranded RNAi agents.

[0232] Accordingly, the invention provides double-stranded RNAi agents with chemical modifications capable of inhibiting the expression of a target gene (i.e., a TMPRSS6 gene) in vivo. In certain aspects of the invention, substantially all of the nucleotides of an iRNA of the invention are modified. In other embodiments of the invention, all of the nucleotides of an iRNA of the invention are modified. iRNAs of the invention in which “substantially all of the nucleotides are modified” are largely but not wholly modified and can include not more than 5, 4, 3, 2, or 1 unmodified nucleotides.

[0233] The RNAi agent comprises a sense strand and an antisense strand. Each strand of the RNAi agent may range from 12-30 nucleotides in length. For example, each strand may be between 14-30 nucleotides in length, 17-30 nucleotides in length, 19-30 nucleotides in length, 25-30 nucleotides in length, 27-30 nucleotides in length, 17-23 nucleotides in length, 17-21 nucleotides in length, 17-19 nucleotides in length, 19-25 nucleotides in length, 19-23 nucleotides in length, 19-21 nucleotides in length, 21-25 nucleotides in length, or 21-23 nucleotides in length.

[0234] The sense strand and antisense strand typically form a duplex double stranded RNA (“dsRNA”), also referred to herein as an “RNAi agent.” The duplex region of an RNAi agent may be 12-30 nucleotide pairs in length. For example, the duplex region can be between 14-30 nucleotide pairs in length, 17-30 nucleotide pairs in length, 27-30 nucleotide pairs in length, 17-23 nucleotide pairs in length, 17-21 nucleotide pairs in length, 17-19 nucleotide pairs in length, 19-25 nucleotide pairs in length, 19-23 nucleotide pairs in length, 19-21 nucleotide pairs in length, 21-25 nucleotide pairs in length, or 21-23 nucleotide pairs in length. In another example, the duplex region is selected from 15, 16, 17, 18, 19, 20, 21, 22, 23, 24, 25, 26, and 27 nucleotides in length.

[0235] In one embodiment, the RNAi agent may contain one or more overhang regions and/or capping groups at the 3′-end, 5′-end, or both ends of one or both strands. The overhang can be 1-6 nucleotides in length, for instance 2-6 nucleotides in length, 1-5 nucleotides in length, 2-5 nucleotides in length, 1-4 nucleotides in length, 2-4 nucleotides in length, 1-3 nucleotides in length, 2-3 nucleotides in length, or 1-2 nucleotides in length. The overhangs can be the result of one strand being longer than the other, or the result of two strands of the same length being staggered. The overhang can form a mismatch with the target mRNA or it can be complementary to the gene sequences being targeted or can be another sequence. The first and second strands can also be joined, e.g., by additional bases to form a hairpin, or by other non-base linkers.

[0236] In one embodiment, the nucleotides in the overhang region of the RNAi agent can each independently be a modified or unmodified nucleotide including, but no limited to 2′-sugar modified, such as, 2-F, 2′-O-methyl, thymidine (T), 2′-O-methoxyethyl-5-methyluridine (Teo), 2′-O-methoxyethyladenosine (Aco), 2-O-methoxyethyl-5-methylcytidine (m5Ceo), and any combinations thereof. For example, TT can be an overhang sequence for either end on either strand. The overhang can form a mismatch with the target mRNA or it can be complementary to the gene sequences being targeted or can be another sequence.

[0237] The 5′- or 3′-overhangs at the sense strand, antisense strand or both strands of the RNAi agent may be phosphorylated. In some embodiments, the overhang region(s) contains two nucleotides having a phosphorothioate between the two nucleotides, where the two nucleotides can be the same or different. In one embodiment, the overhang is present at the 3′-end of the sense strand, antisense strand, or both strands. In one embodiment, this 3′-overhang is present in the antisense strand. In one embodiment, this 3′-overhang is present in the sense strand.

[0238] The RNAi agent may contain only a single overhang, which can strengthen the interference activity of the RNAi, without affecting its overall stability. For example, the single-stranded overhang may be located at the 3′-terminal end of the sense strand or, alternatively, at the 3′-terminal end of the antisense strand. The RNAi may also have a blunt end, located at the 5′-end of the antisense strand (or the 3′-end of the sense strand) or vice versa. Generally, the antisense strand of the RNAi has a nucleotide overhang at the 3′-end, and the 5′-end is blunt. While not wishing to be bound by theory, the asymmetric blunt end at the 5′-end of the antisense strand and 3′-end overhang of the antisense strand favor the guide strand loading into RISC process.

[0239] Any of the nucleic acids featured in the invention can be synthesized and/or modified by methods well established in the art, such as those described in “Current protocols in nucleic acid chemistry,” Beaucage, S. L. et al. (Edrs.), John Wiley & Sons, Inc., New York, NY, USA, which is hereby incorporated herein by reference. Modifications include, for example, end modifications, e.g., 5′-end modifications (phosphorylation, conjugation, inverted linkages) or 3′-end modifications (conjugation, DNA nucleotides, inverted linkages, etc.); base modifications, e.g., replacement with stabilizing bases, destabilizing bases, or bases that base pair with an expanded repertoire of partners, removal of bases (abasic nucleotides), or conjugated bases; sugar modifications (e.g., at the 2′-position or 4′-position) or replacement of the sugar; and/or backbone modifications, including modification or replacement of the phosphodiester linkages. Specific examples of iRNA compounds useful in the embodiments described herein include, but are not limited to RNAs containing modified backbones or no natural internucleoside linkages. RNAs having modified backbones include, among others, those that do not have a phosphorus atom in the backbone. For the purposes of this specification, and as sometimes referenced in the art, modified RNAs that do not have a phosphorus atom in their internucleoside backbone can also be considered to be oligonucleosides. In some embodiments, a modified iRNA will have a phosphorus atom in its internucleoside backbone.

[0240] Modified RNA backbones include, for example, phosphorothioates, chiral phosphorothioates, phosphorodithioates, phosphotriesters, aminoalkylphosphotriesters, methyl and other alkyl phosphonates including 3′-alkylene phosphonates and chiral phosphonates, phosphinates, phosphoramidates including 3′-amino phosphoramidate and aminoalkylphosphoramidates, thionophosphoramidates, thionoalkylphosphonates, thionoalkylphosphotriesters, and boranophosphates having normal 3′-5′ linkages, 2′-5′-linked analogs of these, and those having inverted polarity wherein the adjacent pairs of nucleoside units are linked 3′-5′ to 5′-3′ or 2′-5′ to 5′-2′. Various salts, mixed salts and free acid forms are also included.

[0241] Representative U.S. patents that teach the preparation of the above phosphorus-containing linkages include, but are not limited to, U.S. Pat. Nos. 3,687,808; 4,469,863; 4,476,301; 5,023,243; 5,177,195; 5,188,897; 5,264,423; 5,276,019; 5,278,302; 5,286,717; 5,321,131; 5,399,676; 5,405,939; 5,453,496; 5,455,233; 5,466,677; 5,476,925; 5,519,126; 5,536,821; 5,541,316; 5,550,111; 5,563,253; 5,571,799; 5,587,361; 5,625,050; 6,028,188; 6,124,445; 6,160,109; 6,169,170; 6,172,209; 6,239,265; 6,277,603; 6,326,199; 6,346,614; 6,444,423; 6,531,590; 6,534,639; 6,608,035; 6,683,167; 6,858,715; 6,867,294; 6,878,805; 7,015,315; 7,041,816; 7,273,933; 7,321,029; and U.S. Pat. RE39464, the entire contents of each of which are hereby incorporated herein by reference.

[0242] Modified RNA backbones that do not include a phosphorus atom therein have backbones that are formed by short chain alkyl or cycloalkyl internucleoside linkages, mixed heteroatoms and alkyl or cycloalkyl internucleoside linkages, or one or more short chain heteroatomic or heterocyclic internucleoside linkages. These include those having morpholino linkages (formed in part from the sugar portion of a nucleoside); siloxane backbones; sulfide, sulfoxide and sulfone backbones; formacetyl and thioformacetyl backbones; methylene formacetyl and thioformacetyl backbones; alkene containing backbones; sulfamate backbones; methylencimino and methylenehydrazino backbones; sulfonate and sulfonamide backbones; amide backbones; and others having mixed N, O, S and CH₂ component parts.

[0243] Representative U.S. patents that teach the preparation of the above oligonucleosides include, but are not limited to, U.S. Pat. Nos. 5,034,506; 5,166,315; 5,185,444; 5,214,134; 5,216,141; 5,235,033; 5,664,562; 5,264,564; 5,405,938; 5,434,257; 5,466,677; 5,470,967; 5,489,677; 5,541,307; 5,561,225; 5,596,086; 5,602,240; 5,608,046; 5,610,289; 5,618,704; 5,623,070; 5,663,312; 5,633,360; 5,677,437; and, 5,677,439, the entire contents of each of which are hereby incorporated herein by reference.

[0244] In other embodiments, suitable RNA mimetics are contemplated for use in iRNAs, in which both the sugar and the internucleoside linkage, i.e., the backbone, of the nucleotide units are replaced with novel groups. The base units are maintained for hybridization with an appropriate nucleic acid target compound. One such oligomeric compound, an RNA mimetic that has been shown to have excellent hybridization properties, is referred to as a peptide nucleic acid (PNA). In PNA compounds, the sugar backbone of an RNA is replaced with an amide containing backbone, in particular an aminoethylglycine backbone. The nucleobases are retained and are bound directly or indirectly to aza nitrogen atoms of the amide portion of the backbone. Representative U.S. patents that teach the preparation of PNA compounds include, but are not limited to, U.S. Pat. Nos. 5,539,082; 5,714,331; and 5,719,262, the entire contents of each of which are hereby incorporated herein by reference. Additional PNA compounds suitable for use in the iRNAs of the invention are described in, for example, in Nielsen et al., Science, 1991, 254, 1497-1500.

[0245] Some embodiments featured in the invention include RNAs with phosphorothioate backbones and oligonucleosides with heteroatom backbones, and in particular —CH₂—NH—CH₂—, —CH₂—N(CH₃)—O—CH₂—[known as a methylene (methylimino) or MMI backbone], —CH₂—O—N(CH₃)—CH₂—, —CH₂—N(CH₃)—N(CH₃)—CH₂— and —N(CH₃)—CH₂—CH₂—[wherein the native phosphodiester backbone is represented as —O—P—O—CH₂—] of the above-referenced U.S. Pat. No. 5,489,677, and the amide backbones of the above-referenced U.S. Pat. No. 5,602,240. In some embodiments, the RNAs featured herein have morpholino backbone structures of the above-referenced U.S. Pat. No. 5,034,506.

[0246] Modified RNAs can also contain one or more substituted sugar moieties. The iRNAs, e.g., dsRNAs, featured herein can include one of the following at the 2′-position: OH; F; O—, S-, or N-alkyl; O—, S-, or N-alkenyl; O—, S- or N-alkynyl; or O-alkyl-O-alkyl, wherein the alkyl, alkenyl and alkynyl can be substituted or unsubstituted C₁ to C₁₀ alkyl or C₂ to C₁₀ alkenyl and alkynyl. Exemplary suitable modifications include O[(CH₂)ₙO]ₘCH₃, O(CH₂)ₙOCH₃, O(CH₂)ₙNH₂, O(CH₂)ₙCH₃, O(CH₂)ₙONH₂, and O(CH₂)ₙON[(CH₂)ₙCH₃)]₂, where n and m are from 1 to about 10. In other embodiments, dsRNAs include one of the following at the 2′ position: C₁ to C₁₀ lower alkyl, substituted lower alkyl, alkaryl, aralkyl, O-alkaryl or O-aralkyl, SH, SCH₃, OCN, Cl, Br, CN, CF₃, OCF₃, SOCH₃, SO₂CH₃, ONO₂, NO₂, N₃, NH₂, heterocycloalkyl, heterocycloalkaryl, aminoalkylamino, polyalkylamino, substituted silyl, an RNA cleaving group, a reporter group, an intercalator, a group for improving the pharmacokinetic properties of an iRNA, or a group for improving the pharmacodynamic properties of an iRNA, and other substituents having similar properties. In some embodiments, the modification includes a 2′-methoxyethoxy (2′-O—CH₂CH₂OCH₃, also known as 2′-O-(2-methoxyethyl) or 2′-MOE) (Martin et al., Helv. Chim. Acta, 1995, 78:486-504) i.e., an alkoxy-alkoxy group. Another exemplary modification is 2′-dimethylaminooxyethoxy, i.e., a O(CH₂)₂ON(CH₃)₂ group, also known as 2′-DMAOE, as described in examples herein below, and 2′-dimethylaminoethoxyethoxy (also known in the art as 2′-O-dimethylaminoethoxyethyl or 2′-DMAEOE), i.e., 2′-O—CH₂—O—CH₂—N(CH₂)₂.

[0247] Other modifications include 2′-methoxy (2′—OCH₃), 2′-aminopropoxy (2′-OCH₂CH₂CH₂NH₂) and 2′-fluoro (2′-F). Similar modifications can also be made at other positions on the RNA of an iRNA, particularly the 3′ position of the sugar on the 3′ terminal nucleotide or in 2′-5′ linked dsRNAs and the 5′ position of 5′ terminal nucleotide. iRNAs can also have sugar mimetics such as cyclobutyl moieties in place of the pentofuranosyl sugar.

[0248] Representative U.S. patents that teach the preparation of such modified sugar structures include, but are not limited to, U.S. Pat. Nos. 4,981,957; 5,118,800; 5,319,080; 5,359,044; 5,393,878; 5,446,137; 5,466,786; 5,514,785; 5,519,134; 5,567,811; 5,576,427; 5,591,722; 5,597,909; 5,610,300; 5,627,053; 5,639,873; 5,646,265; 5,658,873; 5,670,633; and 5,700,920, certain of which are commonly owned with the instant application. The entire contents of each of the foregoing are hereby incorporated herein by reference.

[0249] An iRNA can also include nucleobase (often referred to in the art simply as “base”) modifications or substitutions. As used herein, “unmodified” or “natural” nucleobases include the purine bases adenine (A) and guanine (G), and the pyrimidine bases thymine (T), cytosine (C) and uracil (U). Modified nucleobases include other synthetic and natural nucleobases such as deoxy-thymine (dT), 5-methylcytosine (5-me-C), 5-hydroxymethyl cytosine, xanthine, hypoxanthine, 2-aminoadenine, 6-methyl and other alkyl derivatives of adenine and guanine, 2-propyl and other alkyl derivatives of adenine and guanine, 2-thiouracil, 2-thiothymine and 2-thiocytosine, 5-halouracil and cytosine, 5-propynyl uracil and cytosine, 6-azo uracil, cytosine and thymine, 5-uracil (pseudouracil), 4-thiouracil, 8-halo, 8-amino, 8-thiol, 8-thioalkyl, 8-hydroxyl anal other 8-substituted adenines and guanines, 5-halo, particularly 5-bromo, 5-trifluoromethyl and other 5-substituted uracils and cytosines, 7-methylguanine and 7-methyladenine, 8-azaguanine and 8-azaadenine, 7-deazaguanine and 7-daazaadenine and 3-deazaguanine and 3-deazaadenine. Further nucleobases include those disclosed in U.S. Pat. No. 3,687,808, those disclosed in Modified Nucleosides in Biochemistry, Biotechnology and Medicine, Herdewijn, P. ed. Wiley-VCH, 2008; those disclosed in The Concise Encyclopedia Of Polymer Science And Engineering, pages 858-859, Kroschwitz, J. L, ed. John Wiley & Sons, 1990, these disclosed by Englisch et al., Angewandte Chemie, International Edition, 1991, 30, 613, and those disclosed by Sanghvi, Y S., Chapter 15, dsRNA Research and Applications, pages 289-302, Crooke, S. T. and Lebleu, B., Ed., CRC Press, 1993. Certain of these nucleobases are particularly useful for increasing the binding affinity of the oligomeric compounds featured in the invention. These include 5-substituted pyrimidines, 6-azapyrimidines and N-2, N-6 and 0-6 substituted purines, including 2-aminopropyladenine, 5-propynyluracil and 5-propynylcytosine. 5-methylcytosine substitutions have been shown to increase nucleic acid duplex stability by 0.6-1.2° C. (Sanghvi, Y. S., Crooke, S. T. and Lebleu, B., Eds., dsRNA Research and Applications, CRC Press, Boca Raton, 1993, pp. 276-278) and are exemplary base substitutions, even more particularly when combined with 2′-O-methoxyethyl sugar modifications.

[0250] Representative U.S. patents that teach the preparation of certain of the above noted modified nucleobases as well as other modified nucleobases include, but are not limited to, the above noted U.S. Pat. Nos. 3,687,808, 4,845,205; 5,130,30; 5,134,066; 5,175,273; 5,367,066; 5,432,272; 5,457,187; 5,459,255; 5,484,908; 5,502,177; 5,525,711; 5,552,540; 5,587,469; 5,594, 121, 5,596,091; 5,614,617; 5,681,941; 5,750,692; 6,015,886; 6,147,200; 6,166,197; 6,222,025; 6,235,887; 6,380,368; 6,528,640; 6,639,062; 6,617,438; 7,045,610; 7,427,672; and 7,495,088, the entire contents of each of which are hereby incorporated herein by reference.

[0251] The RNA of an iRNA can also be modified to include one or more locked nucleic acids (LNA). A locked nucleic acid is a nucleotide having a modified ribose moiety in which the ribose moiety comprises an extra bridge connecting the 2′ and 4′ carbons. This structure effectively “locks” the ribose in the 3′-endo structural conformation. The addition of locked nucleic acids to siRNAs has been shown to increase siRNA stability in serum, and to reduce off-target effects (Elmen, J. et al., (2005) Nucleic Acids Research 33(1):439-447; Mook, O R. et al., (2007) Mol Canc Ther 6(3):833-843; Grunweller, A. et al., (2003) Nucleic Acids Research 31(12):3185-3193).

[0252] Representative U.S. Patents that teach the preparation of locked nucleic acid nucleotides include, but are not limited to, the following: U.S. Pat. Nos. 6,268,490; 6,670,461; 6,794,499; 6,998,484; 7,053,207; 7,084,125; and 7,399,845, the entire contents of each of which are hereby incorporated herein by reference.

[0253] Potentially stabilizing modifications to the ends of RNA molecules can include N-(acetylaminocaproyl)-4-hydroxyprolinol (Hyp-C6-NHAc), N-(caproyl-4-hydroxyprolinol (Hyp-C6), N-(acetyl-4-hydroxyprolinol (Hyp-NHAc), thymidine-2′-O-deoxythymidine (ether), N-(aminocaproyl)-4-hydroxyprolinol (Hyp-C6-amino), 2-docosanoyl-uridine-3″-phosphate, inverted base dT(idT) and others. Disclosure of this modification can be found in PCT Publication No. WO 2011/005861.

A. Modified iRNAs Comprising Motifs of the Invention

[0254] In certain aspects of the invention, the double-stranded RNAi agents of the invention include agents with chemical modifications as disclosed, for example, in U.S. Provisional Application No. 61/561,710, filed on Nov. 18, 2011, or in PCT/US2012/065691, filed on Nov. 16, 2012, the entire contents of each of which are incorporated herein by reference.

[0255] As shown herein and in Provisional Application No. 61/561,710, a superior result may be obtained by introducing one or more motifs of three identical modifications on three consecutive nucleotides into a sense strand and/or antisense strand of a RNAi agent, particularly at or near the cleavage site. In some embodiments, the sense strand and antisense strand of the RNAi agent may otherwise be completely modified. The introduction of these motifs interrupts the modification pattern, if present, of the sense and/or antisense strand. The RNAi agent may be optionally conjugated with a GalNAc derivative ligand, for instance on the sense strand. The resulting RNAi agents present superior gene silencing activity.

[0256] More specifically, it has been surprisingly discovered that when the sense strand and antisense strand of the double-stranded RNAi agent are modified to have one or more motifs of three identical modifications on three consecutive nucleotides at or near the cleavage site of at least one strand of an RNAi agent, the gene silencing activity of the RNAi agent was superiorly enhanced.

[0257] In one embodiment, the RNAi agent is a double ended bluntmer of 19 nucleotides in length, wherein the sense strand contains at least one motif of three 2′-F modifications on three consecutive nucleotides at positions 7, 8, 9 from the 5′end. The antisense strand contains at least one motif of three 2′-O-methyl modifications on three consecutive nucleotides at positions 11, 12, 13 from the 5′end.

[0258] In another embodiment, the RNAi agent is a double ended bluntmer of 20 nucleotides in length, wherein the sense strand contains at least one motif of three 2′-F modifications on three consecutive nucleotides at positions 8, 9, 10 from the 5′end. The antisense strand contains at least one motif of three 2′-O-methyl modifications on three consecutive nucleotides at positions 11, 12, 13 from the 5′end.

[0259] In yet another embodiment, the RNAi agent is a double ended bluntmer of 21 nucleotides in length, wherein the sense strand contains at least one motif of three 2′-F modifications on three consecutive nucleotides at positions 9, 10, 11 from the 5′end. The antisense strand contains at least one motif of three 2′-O-methyl modifications on three consecutive nucleotides at positions 11, 12, 13 from the 5′end.

[0260] In one embodiment, the RNAi agent comprises a 21 nucleotide sense strand and a 23 nucleotide antisense strand, wherein the sense strand contains at least one motif of three 2′-F modifications on three consecutive nucleotides at positions 9, 10, 11 from the 5′end; the antisense strand contains at least one motif of three 2′-O-methyl modifications on three consecutive nucleotides at positions 11, 12, 13 from the 5′end, wherein one end of the RNAi agent is blunt, while the other end comprises a 2 nucleotide overhang. Preferably, the 2 nucleotide overhang is at the 3′-end of the antisense strand. When the 2 nucleotide overhang is at the 3′-end of the antisense strand, there may be two phosphorothioate internucleotide linkages between the terminal three nucleotides, wherein two of the three nucleotides are the overhang nucleotides, and the third nucleotide is a paired nucleotide next to the overhang nucleotide. In one embodiment, the RNAi agent additionally has two phosphorothioate internucleotide linkages between the terminal three nucleotides at both the 5′-end of the sense strand and at the 5′-end of the antisense strand. In one embodiment, every nucleotide in the sense strand and the antisense strand of the RNAi agent, including the nucleotides that are part of the motifs are modified nucleotides. In one embodiment each residue is independently modified with a 2′-O-methyl or 3′-fluoro, e.g., in an alternating motif. Optionally, the RNAi agent further comprises a ligand (preferably GalNAc3).

[0261] In one embodiment, the RNAi agent comprises sense and antisense strands, wherein the RNAi agent comprises a first strand having a length which is at least 25 and at most 29 nucleotides and a second strand having a length which is at most 30 nucleotides with at least one motif of three 2′-O-methyl modifications on three consecutive nucleotides at position 11, 12, 13 from the 5′ end; wherein the 3′ end of the first strand and the 5′ end of the second strand form a blunt end and the second strand is 1˜4 nucleotides longer at its 3′ end than the first strand, wherein the duplex region region which is at least 25 nucleotides in length, and the second strand is sufficiently complementary to a target mRNA along at least 19 nucleotide of the second strand length to reduce target gene expression when the RNAi agent is introduced into a mammalian cell, and wherein dicer cleavage of the RNAi agent preferentially results in an siRNA comprising the 3′ end of the second strand, thereby reducing expression of the target gene in the mammal. Optionally, the RNAi agent further comprises a ligand.

[0262] In one embodiment, the sense strand of the RNAi agent contains at least one motif of three identical modifications on three consecutive nucleotides, where one of the motifs occurs at the cleavage site in the sense strand.

[0263] In one embodiment, the antisense strand of the RNAi agent can also contain at least one motif of three identical modifications on three consecutive nucleotides, where one of the motifs occurs at or near the cleavage site in the antisense strand

[0264] For an RNAi agent having a duplex region of 17-23 nucleotide in length, the cleavage site of the antisense strand is typically around the 10, 11 and 12 positions from the 5′-end. Thus the motifs of three identical modifications may occur at the 9, 10, 11 positions; 10, 11, 12 positions; 11, 12, 13 positions; 12, 13, 14 positions; or 13, 14, 15 positions of the antisense strand, the count starting from the 1^{st} nucleotide from the 5′-end of the antisense strand, or, the count starting from the 1^{st} paired nucleotide within the duplex region from the 5′-end of the antisense strand. The cleavage site in the antisense strand may also change according to the length of the duplex region of the RNAi from the 5′-end.

[0265] The sense strand of the RNAi agent may contain at least one motif of three identical modifications on three consecutive nucleotides at the cleavage site of the strand; and the antisense strand may have at least one motif of three identical modifications on three consecutive nucleotides at or near the cleavage site of the strand. When the sense strand and the antisense strand form a dsRNA duplex, the sense strand and the antisense strand can be so aligned that one motif of the three nucleotides on the sense strand and one motif of the three nucleotides on the antisense strand have at least one nucleotide overlap, i.e., at least one of the three nucleotides of the motif in the sense strand forms a base pair with at least one of the three nucleotides of the motif in the antisense strand. Alternatively, at least two nucleotides may overlap, or all three nucleotides may overlap.

[0266] In one embodiment, the sense strand of the RNAi agent may contain more than one motif of three identical modifications on three consecutive nucleotides. The first motif may occur at or near the cleavage site of the strand and the other motifs may be a wing modification. The term “wing modification” herein refers to a motif occurring at another portion of the strand that is separated from the motif at or near the cleavage site of the same strand. The wing modification is either adjacent to the first motif or is separated by at least one or more nucleotides. When the motifs are immediately adjacent to each other then the chemistry of the motifs are distinct from each other and when the motifs are separated by one or more nucleotide than the chemistries can be the same or different. Two or more wing modifications may be present. For instance, when two wing modifications are present, each wing modification may occur at one end relative to the first motif which is at or near cleavage site or on either side of the lead motif.

[0267] Like the sense strand, the antisense strand of the RNAi agent may contain more than one motifs of three identical modifications on three consecutive nucleotides, with at least one of the motifs occurring at or near the cleavage site of the strand. This antisense strand may also contain one or more wing modifications in an alignment similar to the wing modifications that may be present on the sense strand.

[0268] In one embodiment, the wing modification on the sense strand or antisense strand of the RNAi agent typically does not include the first one or two terminal nucleotides at the 3′-end, 5′-end or both ends of the strand.

[0269] In another embodiment, the wing modification on the sense strand or antisense strand of the RNAi agent typically does not include the first one or two paired nucleotides within the duplex region at the 3′-end, 5′-end or both ends of the strand.

[0270] When the sense strand and the antisense strand of the RNAi agent each contain at least one wing modification, the wing modifications may fall on the same end of the duplex region, and have an overlap of one, two or three nucleotides.

[0271] When the sense strand and the antisense strand of the RNAi agent each contain at least two wing modifications, the sense strand and the antisense strand can be so aligned that two modifications each from one strand fall on one end of the duplex region, having an overlap of one, two or three nucleotides; two modifications each from one strand fall on the other end of the duplex region, having an overlap of one, two or three nucleotides; two modifications one strand fall on each side of the lead motif, having an overlap of one, two or three nucleotides in the duplex region.

[0272] In one embodiment, every nucleotide in the sense strand and antisense strand of the RNAi agent, including the nucleotides that are part of the motifs, may be modified. Each nucleotide may be modified with the same or different modification which can include one or more alteration of one or both of the non-linking phosphate oxygens and/or of one or more of the linking phosphate oxygens; alteration of a constituent of the ribose sugar, e.g., of the 2′ hydroxyl on the ribose sugar; wholesale replacement of the phosphate moiety with “dephospho” linkers; modification or replacement of a naturally occurring base; and replacement or modification of the ribose-phosphate backbone.

[0273] As nucleic acids are polymers of subunits, many of the modifications occur at a position which is repeated within a nucleic acid, e.g., a modification of a base, or a phosphate moiety, or a non-linking O of a phosphate moiety. In some cases the modification will occur at all of the subject positions in the nucleic acid but in many cases it will not. By way of example, a modification may only occur at a 3′ or 5′ terminal position, may only occur in a terminal region, e.g., at a position on a terminal nucleotide or in the last 2, 3, 4, 5, or 10 nucleotides of a strand. A modification may occur in a double strand region, a single strand region, or in both. A modification may occur only in the double strand region of a RNA or may only occur in a single strand region of a RNA. For example, a phosphorothioate modification at a non-linking O position may only occur at one or both termini, may only occur in a terminal region, e.g., at a position on a terminal nucleotide or in the last 2, 3, 4, 5, or 10 nucleotides of a strand, or may occur in double strand and single strand regions, particularly at termini. The 5′ end or ends can be phosphorylated.

[0274] It may be possible, e.g., to enhance stability, to include particular bases in overhangs, or to include modified nucleotides or nucleotide surrogates, in single strand overhangs, e.g., in a 5′ or 3′ overhang, or in both. For example, it can be desirable to include purine nucleotides in overhangs. In some embodiments all or some of the bases in a 3′ or 5′ overhang may be modified, e.g., with a modification described herein. Modifications can include, e.g., the use of modifications at the 2′ position of the ribose sugar with modifications that are known in the art, e.g., the use of deoxyribonucleotides, 2′-deoxy-2′-fluoro (2′-F) or 2′-O-methyl modified instead of the ribosugar of the nucleobase, and modifications in the phosphate group, e.g., phosphorothioate modifications. Overhangs need not be homologous with the target sequence.

[0275] In one embodiment, each residue of the sense strand and antisense strand is independently modified with LNA, HNA, CeNA, 2′-methoxyethyl, 2′-O-methyl, 2′-O-allyl, 2′-C-allyl, 2′-deoxy, 2′-hydroxyl, or 2′-fluoro. The strands can contain more than one modification. In one embodiment, each residue of the sense strand and antisense strand is independently modified with 2′-O-methyl or 2′-fluoro.

[0276] At least two different modifications are typically present on the sense strand and antisense strand. Those two modifications may be the 2′-O-methyl or 2′-fluoro modifications, or others.

[0277] In one embodiment, the Nₐ and/or N_{b} comprise modifications of an alternating pattern. The term “alternating motif” as used herein refers to a motif having one or more modifications, each modification occurring on alternating nucleotides of one strand. The alternating nucleotide may refer to one per every other nucleotide or one per every three nucleotides, or a similar pattern. For example, if A, B and C each represent one type of modification to the nucleotide, the alternating motif can be “ABABABABABAB . . . ,” “AABBAABBAABB . . . ,” “AABAABAABAAB . . . ,” “AAABAAABAAAB . . . ,” “AAABBBAAABBB . . . ,” or “ABCABCABCABC . . . ,” etc.

[0278] The type of modifications contained in the alternating motif may be the same or different. For example, if A, B, C, D each represent one type of modification on the nucleotide, the alternating pattern, i.e., modifications on every other nucleotide, may be the same, but each of the sense strand or antisense strand can be selected from several possibilities of modifications within the alternating motif such as “ABABAB . . . ”, “ACACAC . . . ” “BDBDBD . . . ” or “CDCDCD . . . ,” etc.

[0279] In one embodiment, the RNAi agent of the invention comprises the modification pattern for the alternating motif on the sense strand relative to the modification pattern for the alternating motif on the antisense strand is shifted. The shift may be such that the modified group of nucleotides of the sense strand corresponds to a differently modified group of nucleotides of the antisense strand and vice versa. For example, the sense strand when paired with the antisense strand in the dsRNA duplex, the alternating motif in the sense strand may start with “ABABAB” from 5′-3′ of the strand and the alternating motif in the antisense strand may start with “BABABA” from 5′-3′ of the strand within the duplex region. As another example, the alternating motif in the sense strand may start with “AABBAABB” from 5′-3′ of the strand and the alternating motif in the antisenese strand may start with “BBAABBAA” from 5′-3′ of the strand within the duplex region, so that there is a complete or partial shift of the modification patterns between the sense strand and the antisense strand.

[0280] In one embodiment, the RNAi agent comprises the pattern of the alternating motif of 2′-O-methyl modification and 2′-F modification on the sense strand initially has a shift relative to the pattern of the alternating motif of 2′-O-methyl modification and 2′-F modification on the antisense strand initially, i.e., the 2′-O-methyl modified nucleotide on the sense strand base pairs with a 2′-F modified nucleotide on the antisense strand and vice versa. The 1 position of the sense strand may start with the 2′-F modification, and the 1 position of the antisense strand may start with the 2′-O-methyl modification.

[0281] The introduction of one or more motifs of three identical modifications on three consecutive nucleotides to the sense strand and/or antisense strand interrupts the initial modification pattern present in the sense strand and/or antisense strand. This interruption of the modification pattern of the sense and/or antisense strand by introducing one or more motifs of three identical modifications on three consecutive nucleotides to the sense and/or antisense strand surprisingly enhances the gene silencing activity to the target gene.

[0282] In one embodiment, when the motif of three identical modifications on three consecutive nucleotides is introduced to any of the strands, the modification of the nucleotide next to the motif is a different modification than the modification of the motif. For example, the portion of the sequence containing the motif is “ . . . . NₐYYYN_{b} . . . ,” where “Y” represents the modification of the motif of three identical modifications on three consecutive nucleotide, and “Nₐ” and “No” represent a modification to the nucleotide next to the motif “YYY” that is different than the modification of Y, and where Nₐ and N_{b} can be the same or different modifications. Alternatively, Nₐ and/or N_{b} may be present or absent when there is a wing modification present.

[0283] The RNAi agent may further comprise at least one phosphorothioate or methylphosphonate internucleotide linkage. The phosphorothioate or methylphosphonate internucleotide linkage modification may occur on any nucleotide of the sense strand or antisense strand or both strands in any position of the strand. For instance, the internucleotide linkage modification may occur on every nucleotide on the sense strand and/or antisense strand; each internucleotide linkage modification may occur in an alternating pattern on the sense strand and/or antisense strand; or the sense strand or antisense strand may contain both internucleotide linkage modifications in an alternating pattern. The alternating pattern of the internucleotide linkage modification on the sense strand may be the same or different from the antisense strand, and the alternating pattern of the internucleotide linkage modification on the sense strand may have a shift relative to the alternating pattern of the internucleotide linkage modification on the antisense strand.

[0284] In one embodiment, the RNAi comprises a phosphorothioate or methylphosphonate internucleotide linkage modification in the overhang region. For example, the overhang region may contain two nucleotides having a phosphorothioate or methylphosphonate internucleotide linkage between the two nucleotides. Internucleotide linkage modifications also may be made to link the overhang nucleotides with the terminal paired nucleotides within the duplex region. For example, at least 2, 3, 4, or all the overhang nucleotides may be linked through phosphorothioate or methylphosphonate internucleotide linkage, and optionally, there may be additional phosphorothioate or methylphosphonate internucleotide linkages linking the overhang nucleotide with a paired nucleotide that is next to the overhang nucleotide. For instance, there may be at least two phosphorothioate internucleotide linkages between the terminal three nucleotides, in which two of the three nucleotides are overhang nucleotides, and the third is a paired nucleotide next to the overhang nucleotide. These terminal three nucleotides may be at the 3′-end of the antisense strand, the 3′-end of the sense strand, the 5′-end of the antisense strand, and/or the 5′end of the antisense strand.

[0285] In one embodiment, the 2 nucleotide overhang is at the 3′-end of the antisense strand, and there are two phosphorothioate internucleotide linkages between the terminal three nucleotides, wherein two of the three nucleotides are the overhang nucleotides, and the third nucleotide is a paired nucleotide next to the overhang nucleotide. Optionally, the RNAi agent may additionally have two phosphorothioate internucleotide linkages between the terminal three nucleotides at both the 5′-end of the sense strand and at the 5′-end of the antisense strand.

[0286] In one embodiment, the RNAi agent comprises mismatch(es) with the target, within the duplex, or combinations thereof. The mistmatch may occur in the overhang region or the duplex region. The base pair may be ranked on the basis of their propensity to promote dissociation or melting (e.g., on the free energy of association or dissociation of a particular pairing, the simplest approach is to examine the pairs on an individual pair basis, though next neighbor or similar analysis can also be used). In terms of promoting dissociation: A:U is preferred over G:C; G:U is preferred over G:C; and I:C is preferred over G:C (I=inosine). Mismatches, e.g., non-canonical or other than canonical pairings (as described elsewhere herein) are preferred over canonical (A:T, A:U, G:C) pairings; and pairings which include a universal base are preferred over canonical pairings.

[0287] In one embodiment, the RNAi agent comprises at least one of the first 1, 2, 3, 4, or 5 base pairs within the duplex regions from the 5′-end of the antisense strand independently selected from the group of: A:U, G:U, I:C, and mismatched pairs, e.g., non-canonical or other than canonical pairings or pairings which include a universal base, to promote the dissociation of the antisense strand at the 5′-end of the duplex.

[0288] In one embodiment, the nucleotide at the I position within the duplex region from the 5′-end in the antisense strand is selected from the group consisting of A, dA, dU, U, and dT. Alternatively, at least one of the first 1, 2 or 3 base pair within the duplex region from the 5′-end of the antisense strand is an AU base pair. For example, the first base pair within the duplex region from the 5′-end of the antisense strand is an AU base pair.

[0289] In one embodiment, the sense strand sequence may be represented by formula (I):

5′ nₚ-Nₐ-(X X X)ᵢ-N_{b}-Y Y Y-N_{b}-(ZZZ)ⱼ-Nₐ-n_{q} 3′ (I)
[0290] wherein:
[0291] i and j are each independently 0 or 1;
[0292] p and q are each independently 0-6;
[0293] each Nₐ independently represents an oligonucleotide sequence comprising 0-25 modified nucleotides, each sequence comprising at least two differently modified nucleotides;
[0294] each N_{b} independently represents an oligonucleotide sequence comprising 0-10 modified nucleotides;
[0295] each nₚ and n_{q} independently represent an overhang nucleotide;
[0296] wherein N_{b} and Y do not have the same modification; and
[0297] XXX, YYY and ZZZ each independently represent one motif of three identical modifications on three consecutive nucleotides. Preferably YYY is all 2′-F modified nucleotides.

[0298] In one embodiment, the Nₐ and/or N_{b} comprise modifications of alternating pattern.

[0299] In one embodiment, the YYY motif occurs at or near the cleavage site of the sense strand. For example, when the RNAi agent has a duplex region of 17-23 nucleotides in length, the YYY motif can occur at or the vicinity of the cleavage site (e.g.: can occur at positions 6, 7, 8, 7, 8, 9, 8, 9, 10, 9, 10, 11, 10, 11, 12 or 11, 12, 13) of—the sense strand, the count starting from the 1^{st} nucleotide, from the 5′-end; or optionally, the count starting at the 1^{st} paired nucleotide within the duplex region, from the 5′-end.

[0300] In one embodiment, i is 1 and j is 0, or i is 0 and j is 1, or both i and j are 1. The sense strand can therefore be represented by the following formulas:

5′ nₚ-Nₐ—YYY-N_{b}-ZZZ-Nₐ-n_{q} 3′ (Ib);

5′ nₚ-Nₐ—XXX-N_{b}-YYY-Nₐ-n_{q} 3′ (Ic); or

5′ nₚ-Nₐ—XXX-N_{b}-YYY-N_{b}-ZZZ-Nₐ-n_{q} 3′ (Id).

[0301] When the sense strand is represented by formula (Ib), N_{b} represents an oligonucleotide sequence comprising 0-10, 0-7, 0-5, 0-4, 0-2 or 0 modified nucleotides. Each Nₐ independently can represent an oligonucleotide sequence comprising 2-20, 2-15, or 2-10 modified nucleotides.

[0302] When the sense strand is represented as formula (Ic), N_{b} represents an oligonucleotide sequence comprising 0-10, 0-7, 0-10, 0-7, 0-5, 0-4, 0-2 or 0 modified nucleotides. Each Nₐ can independently represent an oligonucleotide sequence comprising 2-20, 2-15, or 2-10 modified nucleotides.

[0303] When the sense strand is represented as formula (Id), each N_{b} independently represents an oligonucleotide sequence comprising 0-10, 0-7, 0-5, 0-4, 0-2 or 0 modified nucleotides. Preferably, N_{b} is 0, 1, 2, 3, 4, 5 or 6 Each Nₐ can independently represent an oligonucleotide sequence comprising 2-20, 2-15, or 2-10 modified nucleotides.

[0304] Each of X, Y and Z may be the same or different from each other.

[0305] In other embodiments, i is 0 and j is 0, and the sense strand may be represented by the formula:

5′ nₚ-Nₐ—YYY-Nₐ-n_{q} 3′ (Ia).

[0306] When the sense strand is represented by formula (Ia), each Nₐ independently can represent an oligonucleotide sequence comprising 2-20, 2-15, or 2-10 modified nucleotides.

[0307] In one embodiment, the antisense strand sequence of the RNAi may be represented by formula (II):

5′ n_{q′}-Nₐ′-(Z′Z′Z′)ₖ-N_{b}′-Y′Y′Y′-N_{b}′-(X′X′X′)ₗ-N′ₐ-nₚ′ 3′ (II)
[0308] wherein:
[0309] k and l are each independently 0 or 1;
[0310] p′ and q′ are each independently 0-6;
[0311] each Nₐ′ independently represents an oligonucleotide sequence comprising 0-25 modified nucleotides, each sequence comprising at least two differently modified nucleotides;
[0312] each N_{b}′ independently represents an oligonucleotide sequence comprising 0-10 modified nucleotides;
[0313] each nₚ′ and n_{q}′ independently represent an overhang nucleotide;
[0314] wherein N_{b}′ and Y′ do not have the same modification;
[0315] and
[0316] X′X′X′, Y′Y′Y′ and Z′Z′Z′ each independently represent one motif of three identical modifications on three consecutive nucleotides.

[0317] In one embodiment, the Nₐ′ and/or N_{b}′ comprise modifications of alternating pattern.

[0318] The Y′Y′Y′ motif occurs at or near the cleavage site of the antisense strand. For example, when the RNAi agent has a duplex region of 17-23nucleotide in length, the Y′Y′Y′ motif can occur at positions 9, 10, 11; 10, 11, 12; 11, 12, 13; 12, 13, 14; or 13, 14, 15 of the antisense strand, with the count starting from the 1^{st} nucleotide, from the 5′-end; or optionally, the count starting at the 1^{st} paired nucleotide within the duplex region, from the 5′-end. Preferably, the Y′Y′Y′ motif occurs at positions 11, 12, 13.

[0319] In one embodiment, Y′Y′Y′ motif is all 2′-OMe modified nucleotides.

[0320] In one embodiment, k is 1 and 1 is 0, or k is 0 and 1 is 1, or both k and l are 1.

[0321] The antisense strand can therefore be represented by the following formulas:

5′ n_{q′}-Nₐ′-Z′Z′Z′-N_{b}′-Y′Y′Y′-Nₐ′-nₚ 3′ (IIb);

5′ n_{q}′-Nₐ′-Y′Y′Y′-N_{b}′-X′X′X′-nₚ 3′ (IIc); or

5′ n_{q′}-Nₐ′-Z′Z′Z′-N_{b}′-Y′Y′Y′-N_{b}′-X′X′X′-Nₐ′-nₚ 3′ (IId).

[0322] When the antisense strand is represented by formula (IIb), N_{b} represents an oligonucleotide sequence comprising 0-10, 0-7, 0-10, 0-7, 0-5, 0-4, 0-2 or 0 modified nucleotides. Each Nₐ′ independently represents an oligonucleotide sequence comprising 2-20, 2-15, or 2-10 modified nucleotides.

[0323] When the antisense strand is represented as formula (IIc), N_{b}′ represents an oligonucleotide sequence comprising 0-10, 0-7, 0-10, 0-7, 0-5, 0-4, 0-2 or 0 modified nucleotides. Each Nₐ′ independently represents an oligonucleotide sequence comprising 2-20, 2-15, or 2-10 modified nucleotides.

[0324] When the antisense strand is represented as formula (IId), each N_{b}′ independently represents an oligonucleotide sequence comprising 0-10, 0-7, 0-10, 0-7, 0-5, 0-4, 0-2 or 0 modified nucleotides. Each Nₐ′ independently represents an oligonucleotide sequence comprising 2-20, 2-15, or 2-10 modified nucleotides. Preferably, N_{b} is 0, 1, 2, 3, 4, 5 or 6.

[0325] In other embodiments, k is 0 and 1 is 0 and the antisense strand may be represented by the formula:

5′ nₚ-N_{a′}-Y′Y′Y′-Nₐ-n_{q′}3′ (Ia).

[0326] When the antisense strand is represented as formula (IIa), each Nₐ′ independently represents an oligonucleotide sequence comprising 2-20, 2-15, or 2-10 modified nucleotides.

[0327] Each of X′, Y′ and Z′ may be the same or different from each other.

[0328] Each nucleotide of the sense strand and antisense strand may be independently modified with LNA, HNA, CeNA, 2′-methoxyethyl, 2′-O-methyl, 2′-O-allyl, 2′-C-allyl, 2′-hydroxyl, or 2′-fluoro. For example, each nucleotide of the sense strand and antisense strand is independently modified with 2′-O-methyl or 2′-fluoro. Each X, Y, Z, X′, Y′ and Z′, in particular, may represent a 2′-O-methyl modification or a 2′-fluoro modification.

[0329] In one embodiment, the sense strand of the RNAi agent may contain YYY motif occurring at 9, 10 and 11 positions of the strand when the duplex region is 21 nt, the count starting from the 1^{st} nucleotide from the 5′-end, or optionally, the count starting at the 1^{st} paired nucleotide within the duplex region, from the 5′-end; and Y represents 2′-F modification. The sense strand may additionally contain XXX motif or ZZZ motifs as wing modifications at the opposite end of the duplex region; and XXX and ZZZ each independently represents a 2′-OMe modification or 2′-F modification.

[0330] In one embodiment the antisense strand may contain Y′Y′Y′ motif occurring at positions 11, 12, 13 of the strand, the count starting from the 1^{st} nucleotide from the 5′-end, or optionally, the count starting at the 1^{st} paired nucleotide within the duplex region, from the 5′-end; and Y′ represents 2′-O-methyl modification. The antisense strand may additionally contain X′X′X′ motif or Z′Z′Z′ motifs as wing modifications at the opposite end of the duplex region; and X′X′X′ and Z′Z′Z′ each independently represents a 2′-OMe modification or 2′-F modification.

[0331] The sense strand represented by any one of the above formulas (Ia), (Ib), (Ic), and (Id) forms a duplex with a antisense strand being represented by any one of formulas (IIa), (IIb), (IIc), and (IId), respectively.

[0332] Accordingly, the RNAi agents for use in the methods of the invention may comprise a sense strand and an antisense strand, each strand having 14 to 30 nucleotides, the RNAi duplex represented by formula (III):

sense: 5′ nₚ-Nₐ-(X X X)ᵢ-N_{b}-Y Y Y-N_{b}-(ZZZ)ⱼ-Nₐ-n_{q} 3′

antisense: 3′ nₚ-Nₐ-(X′X′X′)ₖ-ND-Y′Y′Y′-N_{b}-(Z′Z′Z′)ₗ-Nₐ-n_{q} 5′ (III)
[0333] wherein:
[0334] i, j, k, and l are each independently 0 or 1;
[0335] p, p′, q, and q′ are each independently 0-6;
[0336] each Nₐ and Nₐ independently represents an oligonucleotide sequence comprising 0-25 modified nucleotides, each sequence comprising at least two differently modified nucleotides;
[0337] each N_{b} and N_{b} independently represents an oligonucleotide sequence comprising 0-10 modified nucleotides;
[0338] wherein
[0339] each nₚ′, nₚ, n_{q}′, and n_{q}, each of which may or may not be present, independently represents an overhang nucleotide; and
[0340] XXX, YYY, ZZZ, X′X′X′, Y′Y′Y′, and Z′Z′Z′ each independently represent one motif of three identical modifications on three consecutive nucleotides.

[0341] In one embodiment, i is 0 and j is 0; or i is 1 and j is 0; or i is 0 and j is 1; or both i and j are 0; or both i and j are 1. In another embodiment, k is 0 and 1 is 0; or k is 1 and 1 is 0; k is 0 and 1 is 1; or both k and l are 0; or both k and l are 1.

[0342] Exemplary combinations of the sense strand and antisense strand forming a RNAi duplex include the formulas below:

5′ nₚ-Nₐ-Y Y Y-Nₐ-n_{q} 3′

3′ nₚ-Nₐ-Y′Y′Y′-Nₐ n_{q} 5′ (IIIa)

5′ nₚ-Nₐ-Y Y Y-N_{b}-ZZZ-Nₐ-n_{q} 3′

3′ nₚ-Nₐ-Y′Y′Y′-N_{b}—Z′Z′Z′-Nₐ n_{q} 5′ (IIIb)

5′ nₚ-Nₐ-X X X-N_{b}-Y Y Y-Nₐ-n_{q} 3′

3′ nₚ-Nₐ-X′X′X′-N_{b}-Y′Y′Y′-Nₐ-n_{q} 5′ (IIIc)

5′ nₚ-Nₐ—XXX-N_{b}-Y Y Y-N_{b}-ZZZ-Nₐ-n_{q} 3′

3′ nₚ-Nₐ-X′X′X′-N_{b}-Y′Y′Y′-N_{b}—Z′Z′Z′-Nₐ-ng 5′ (IIId)

[0343] When the RNAi agent is represented by formula (IIIa), each Nₐ independently represents an oligonucleotide sequence comprising 2-20, 2-15, or 2-10 modified nucleotides.

[0344] When the RNAi agent is represented by formula (IIIb), each N_{b} independently represents an oligonucleotide sequence comprising 1-10, 1-7, 1-5 or 1-4 modified nucleotides. Each Nₐ independently represents an oligonucleotide sequence comprising 2-20, 2-15, or 2-10 modified nucleotides.

[0345] When the RNAi agent is represented as formula (IIIc), each N_{b}, N_{b}′ independently represents an oligonucleotide sequence comprising 0-10, 0-7, 0-10, 0-7, 0-5, 0-4, 0-2 or 0modified nucleotides. Each Nₐ independently represents an oligonucleotide sequence comprising 2-20, 2-15, or 2-10 modified nucleotides.

[0346] When the RNAi agent is represented as formula (IIId), each N_{b}, N_{b}′ independently represents an oligonucleotide sequence comprising 0-10, 0-7, 0-10, 0-7, 0-5, 0-4, 0-2 or 0modified nucleotides. Each Nₐ, Nₐ independently represents an oligonucleotide sequence comprising 2-20, 2-15, or 2-10 modified nucleotides. Each of Nₐ, Nₐ′, N_{b} and N_{b}′ independently comprises modifications of alternating pattern.

[0347] Each of X, Y and Z in formulas (III), (IIIa), (IIIb), (IIIc), and (IIId) may be the same or different from each other.

[0348] When the RNAi agent is represented by formula (III), (IIIa), (IIIb), (IIIc), and (IIId), at least one of the Y nucleotides may form a base pair with one of the Y′ nucleotides. Alternatively, at least two of the Y nucleotides form base pairs with the corresponding Y′ nucleotides; or all three of the Y nucleotides all form base pairs with the corresponding Y′ nucleotides.

[0349] When the RNAi agent is represented by formula (IIIb) or (IIId), at least one of the Z nucleotides may form a base pair with one of the Z′ nucleotides. Alternatively, at least two of the Z nucleotides form base pairs with the corresponding Z′ nucleotides; or all three of the Z nucleotides all form base pairs with the corresponding Z′ nucleotides.

[0350] When the RNAi agent is represented as formula (IIIc) or (IIId), at least one of the X nucleotides may form a base pair with one of the X′ nucleotides. Alternatively, at least two of the X nucleotides form base pairs with the corresponding X′ nucleotides; or all three of the X nucleotides all form base pairs with the corresponding X′ nucleotides.

[0351] In one embodiment, the modification on the Y nucleotide is different than the modification on the Y′ nucleotide, the modification on the Z nucleotide is different than the modification on the Z′ nucleotide, and/or the modification on the X nucleotide is different than the modification on the X′ nucleotide.

[0352] In one embodiment, when the RNAi agent is represented by formula (IIId), the Nₐ modifications are 2′-O-methyl or 2′-fluoro modifications. In another embodiment, when the RNAi agent is represented by formula (IIId), the Nₐ modifications are 2′-O-methyl or 2′-fluoro modifications and nₚ′>0 and at least one nₚ′ is linked to a neighboring nucleotide a via phosphorothioate linkage. In yet another embodiment, when the RNAi agent is represented by formula (IIId), the Nₐ modifications are 2′-O-methyl or 2′-fluoro modifications, nₚ′>0 and at least one nₚ′ is linked to a neighboring nucleotide via phosphorothioate linkage, and the sense strand is conjugated to one or more GalNAc derivatives attached through a bivalent or trivalent branched linker. In another embodiment, when the RNAi agent is represented by formula (IIId), the Nₐ modifications are 2′-O-methyl or 2′-fluoro modifications, nₚ′>0 and at least one nₚ′ is linked to a neighboring nucleotide via phosphorothioate linkage, the sense strand comprises at least one phosphorothioate linkage, and the sense strand is conjugated to one or more GalNAc derivatives attached through a bivalent or trivalent branched linker.

[0353] In one embodiment, when the RNAi agent is represented by formula (IIIa), the Nₐ modifications are 2′-O-methyl or 2′-fluoro modifications, nₚ′>0 and at least one nₚ′ is linked to a neighboring nucleotide via phosphorothioate linkage, the sense strand comprises at least one phosphorothioate linkage, and the sense strand is conjugated to one or more GalNAc derivatives attached through a bivalent or trivalent branched linker.

[0354] In one embodiment, the RNAi agent is a multimer containing at least two duplexes represented by formula (III), (IIIa), (IIIb), (IIIc), and (IIId), wherein the duplexes are connected by a linker. The linker can be cleavable or non-cleavable. Optionally, the multimer further comprises a ligand. Each of the duplexes can target the same gene or two different genes; or each of the duplexes can target same gene at two different target sites.

[0355] In one embodiment, the RNAi agent is a multimer containing three, four, five, six or more duplexes represented by formula (III), (IIIa), (IIIb), (IIIc), and (IIId), wherein the duplexes are connected by a linker. The linker can be cleavable or non-cleavable. Optionally, the multimer further comprises a ligand. Each of the duplexes can target the same gene or two different genes; or each of the duplexes can target same gene at two different target sites.

[0356] In one embodiment, two RNAi agents represented by formula (III), (IIIa), (IIIb), (IIIc), and (IIId) are linked to each other at the 5′ end, and one or both of the 3′ ends and are optionally conjugated to to a ligand. Each of the agents can target the same gene or two different genes; or each of the agents can target same gene at two different target sites.

[0357] Various publications describe multimeric RNAi agents that can be used in the methods of the invention. Such publications include WO2007/091269, U.S. Pat. No. 7,858,769, WO2010/141511, WO2007/117686, WO2009/014887 and WO2011/031520 the entire contents of each of which are hereby incorporated herein by reference.

[0358] The RNAi agent that contains conjugations of one or more carbohydrate moieties to a RNAi agent can optimize one or more properties of the RNAi agent. In many cases, the carbohydrate moiety will be attached to a modified subunit of the RNAi agent. For example, the ribose sugar of one or more ribonucleotide subunits of a dsRNA agent can be replaced with another moiety, e.g., a non-carbohydrate (preferably cyclic) carrier to which is attached a carbohydrate ligand. A ribonucleotide subunit in which the ribose sugar of the subunit has been so replaced is referred to herein as a ribose replacement modification subunit (RRMS). A cyclic carrier may be a carbocyclic ring system, i.e., all ring atoms are carbon atoms, or a heterocyclic ring system, i.e., one or more ring atoms may be a heteroatom, e.g., nitrogen, oxygen, sulfur. The cyclic carrier may be a monocyclic ring system, or may contain two or more rings, e.g. fused rings. The cyclic carrier may be a fully saturated ring system, or it may contain one or more double bonds.

[0359] The ligand may be attached to the polynucleotide via a carrier. The carriers include (i) at least one “backbone attachment point,” preferably two “backbone attachment points” and (ii) at least one “tethering attachment point.” A “backbone attachment point” as used herein refers to a functional group, e.g. a hydroxyl group, or generally, a bond available for, and that is suitable for incorporation of the carrier into the backbone, e.g., the phosphate, or modified phosphate, e.g., sulfur containing, backbone, of a ribonucleic acid. A “tethering attachment point” (TAP) in some embodiments refers to a constituent ring atom of the cyclic carrier, e.g., a carbon atom or a heteroatom (distinct from an atom which provides a backbone attachment point), that connects a selected moiety. The moiety can be, e.g., a carbohydrate, e.g. monosaccharide, disaccharide, trisaccharide, tetrasaccharide, oligosaccharide and polysaccharide. Optionally, the selected moiety is connected by an intervening tether to the cyclic carrier. Thus, the cyclic carrier will often include a functional group, e.g., an amino group, or generally, provide a bond, that is suitable for incorporation or tethering of another chemical entity, e.g., a ligand to the constituent ring.

[0360] The RNAi agents may be conjugated to a ligand via a carrier, wherein the carrier can be cyclic group or acyclic group; preferably, the cyclic group is selected from pyrrolidinyl, pyrazolinyl, pyrazolidinyl, imidazolinyl, imidazolidinyl, piperidinyl, piperazinyl, [1,3]dioxolane, oxazolidinyl, isoxazolidinyl, morpholinyl, thiazolidinyl, isothiazolidinyl, quinoxalinyl, pyridazinonyl, tetrahydrofuryl and and decalin; preferably, the acyclic group is selected from serinol backbone or diethanolamine backbone.

[0361] In certain specific embodiments, the RNAi agent for use in the methods of the invention is an agent selected from the group of agents listed in any one of Tables 1, 2, 4, 5, 8, 10, and 12. In one embodiment, when the agent is an agent listed in Table 12, the agent may lack a terminal dT.

[0362] The present invention further includes double-stranded RNAi agents comprising any one of the sequences listed in any one of Tables 1, 2, 4, 5, 8, 10, and 12 which comprise a 5′ phosphate or phosphate mimetic on the antisense strand (see, e.g., PCT Publication No. WO 2011005860). Further, the present invention includes double-stranded RNAi agents comprising any one of the sequences listed in any one of Tables 1, 2, 4, 5, 8, 10, and 12 which include a 2′fluoro group in place of a 2′-OMe group at the 5′end of the sense strand.

[0363] These agents may further comprise a ligand.

[0364] In one embodiment, the agent is AD-60940 (sense strand: CfsusGfgUfaUfuUfCfCfuAfgGfgUfaCfaAfL96; antisense strand: usUfsgUfaCfcCfuAfggaAfaUfaCfcAfgsasg).

### A. Ligands

[0365] The double-stranded RNA (dsRNA) agents of the invention may optionally be conjugated to one or more ligands. The ligand can be attached to the sense strand, antisense strand or both strands, at the 3′-end, 5′-end or both ends. For instance, the ligand may be conjugated to the sense strand. In preferred embodiments, the ligand is conjugated to the 3′-end of the sense strand. In one preferred embodiment, the ligand is a GalNAc ligand. In particularly preferred embodiments, the ligand is GalNAc3:

[chemical structure]

[0366] In some embodiments, the ligand, e.g., GalNAc ligand, is attached to the 3′ end of the RNAi agent. In one embodiment, the RNAi agent is conjugated to the ligand, e.g., GalNAc ligand, as shown in the following schematic

[chemical structure]

wherein X is O or S. In one embodiment, X is O.

[0367] A wide variety of entities can be coupled to the RNAi agents of the present invention. Preferred moieties are ligands, which are coupled, preferably covalently, either directly or indirectly via an intervening tether.

[0368] In preferred embodiments, a ligand alters the distribution, targeting or lifetime of the molecule into which it is incorporated. In preferred embodiments a ligand provides an enhanced affinity for a selected target, e.g., molecule, cell or cell type, compartment, receptor e.g., a cellular or organ compartment, tissue, organ or region of the body, as, e.g., compared to a species absent such a ligand. Ligands providing enhanced affinity for a selected target are also termed targeting ligands.

[0369] Some ligands can have endosomolytic properties. The endosomolytic ligands promote the lysis of the endosome and/or transport of the composition of the invention, or its components, from the endosome to the cytoplasm of the cell. The endosomolytic ligand may be a polyanionic peptide or peptidomimetic which shows pH-dependent membrane activity and fusogenicity. In one embodiment, the endosomolytic ligand assumes its active conformation at endosomal pH. The “active” conformation is that conformation in which the endosomolytic ligand promotes lysis of the endosome and/or transport of the composition of the invention, or its components, from the endosome to the cytoplasm of the cell. Exemplary endosomolytic ligands include the GALA peptide (Subbarao et al., Biochemistry, 1987, 26: 2964-2972), the EALA peptide (Vogel et al., J. Am. Chem. Soc., 1996, 118: 1581-1586), and their derivatives (Turk et al., Biochem. Biophys. Acta, 2002, 1559: 56-68). In one embodiment, the endosomolytic component may contain a chemical group (e.g., an amino acid) which will undergo a change in charge or protonation in response to a change in pH. The endosomolytic component may be linear or branched.

[0370] Ligands can improve transport, hybridization, and specificity properties and may also improve nuclease resistance of the resultant natural or modified oligoribonucleotide, or a polymeric molecule comprising any combination of monomers described herein and/or natural or modified ribonucleotides.

[0371] Ligands in general can include therapeutic modifiers, e.g., for enhancing uptake; diagnostic compounds or reporter groups e.g., for monitoring distribution; cross-linking agents; and nuclease-resistance conferring moieties. General examples include lipids, steroids, vitamins, sugars, proteins, peptides, polyamines, and peptide mimics.

[0372] Ligands can include a naturally occurring substance, such as a protein (e.g., human serum albumin (HSA), low-density lipoprotein (LDL), high-density lipoprotein (HDL), or globulin); a carbohydrate (e.g., a dextran, pullulan, chitin, chitosan, inulin, cyclodextrin or hyaluronic acid); or a lipid. The ligand may also be a recombinant or synthetic molecule, such as a synthetic polymer, e.g., a synthetic polyamino acid, an oligonucleotide (e.g., an aptamer). Examples of polyamino acids include polyamino acid is a polylysine (PLL), poly L-aspartic acid, poly L-glutamic acid, styrene-maleic acid anhydride copolymer, poly(L-lactide-co-glycolicd) copolymer, divinyl ether-maleic anhydride copolymer, N-(2-hydroxypropyl)methacrylamide copolymer (HMPA), polyethylene glycol (PEG), polyvinyl alcohol (PVA), polyurethane, poly(2-ethylacryllic acid), N-isopropylacrylamide polymers, or polyphosphazine. Example of polyamines include: polyethylenimine, polylysine (PLL), spermine, spermidine, polyamine, pseudopeptide-polyamine, peptidomimetic polyamine, dendrimer polyamine, arginine, amidine, protamine, cationic lipid, cationic porphyrin, quaternary salt of a polyamine, or an alpha helical peptide.

[0373] Ligands can also include targeting groups, e.g., a cell or tissue targeting agent, e.g., a lectin, glycoprotein, lipid or protein, e.g., an antibody, that binds to a specified cell type such as a kidney cell. A targeting group can be a thyrotropin, melanotropin, lectin, glycoprotein, surfactant protein A, Mucin carbohydrate, multivalent lactose, multivalent galactose, N-acetyl-galactosamine, N-acetyl-glucosamine multivalent mannose, multivalent fucose, glycosylated polyaminoacids, multivalent galactose, transferrin, bisphosphonate, polyglutamate, polyaspartate, a lipid, cholesterol, a steroid, bile acid, folate, vitamin B12, biotin, an RGD peptide, an RGD peptide mimetic or an aptamer.

[0374] Other examples of ligands include dyes, intercalating agents (e.g., acridines), cross-linkers (e.g., psoralene, mitomycin C), porphyrins (TPPC4, texaphyrin, Sapphyrin), polycyclic aromatic hydrocarbons (e.g., phenazine, dihydrophenazine), artificial endonucleases or a chelator (e.g., EDTA), lipophilic molecules, e.g., cholesterol, cholic acid, adamantane acetic acid, 1-pyrene butyric acid, dihydrotestosterone, 1,3-Bis-O(hexadecyl)glycerol, geranyloxyhexyl group, hexadecylglycerol, borneol, menthol, 1,3-propanediol, heptadecyl group, palmitic acid, myristic acid,O3-(oleoyl)lithocholic acid, O3-(oleoyl)cholenic acid, dimethoxytrityl, or phenoxazine) and peptide conjugates (e.g., antennapedia peptide, Tat peptide), alkylating agents, phosphate, amino, mercapto, PEG (e.g., PEG-40K), MPEG, [MPEG]₂, polyamino, alkyl, substituted alkyl, radiolabeled markers, enzymes, haptens (e.g., biotin), transport/absorption facilitators (e.g., aspirin, vitamin E, folic acid), synthetic ribonucleases (e.g., imidazole, bisimidazole, histamine, imidazole clusters, acridine-imidazole conjugates, Eu3+ complexes of tetraazamacrocycles), dinitrophenyl, HRP, or AP.

[0375] Ligands can be proteins, e.g., glycoproteins, or peptides, e.g., molecules having a specific affinity for a co-ligand, or antibodies e.g., an antibody, that binds to a specified cell type such as a cancer cell, endothelial cell, or bone cell. Ligands may also include hormones and hormone receptors. They can also include non-peptidic species, such as lipids, lectins, carbohydrates, vitamins, cofactors, multivalent lactose, multivalent galactose, N-acetyl-galactosamine, N-acetyl-glucosamine multivalent mannose, multivalent fucose, or aptamers. The ligand can be, for example, a lipopolysaccharide, an activator of p38 MAP kinase, or an activator of NF-κB.

[0376] The ligand can be a substance, e.g., a drug, which can increase the uptake of the iRNA agent into the cell, for example, by disrupting the cell's cytoskeleton, e.g., by disrupting the cell's microtubules, microfilaments, and/or intermediate filaments. The drug can be, for example, taxon, vincristine, vinblastine, cytochalasin, nocodazole, japlakinolide, latrunculin A, phalloidin, swinholide A, indanocine, or myoservin.

[0377] The ligand can increase the uptake of the oligonucleotide into the cell by, for example, activating an inflammatory response. Exemplary ligands that would have such an effect include tumor necrosis factor alpha (TNFalpha), interleukin-1 beta, or gamma interferon.

[0378] In one aspect, the ligand is a lipid or lipid-based molecule. Such a lipid or lipid-based molecule preferably binds a serum protein, e.g., human serum albumin (HSA). An HSA binding ligand allows for distribution of the conjugate to a target tissue, e.g., a non-kidney target tissue of the body. For example, the target tissue can be the liver, including parenchymal cells of the liver. Other molecules that can bind HSA can also be used as ligands. For example, naproxen or aspirin can be used. A lipid or lipid-based ligand can (a) increase resistance to degradation of the conjugate, (b) increase targeting or transport into a target cell or cell membrane, and/or (c) can be used to adjust binding to a serum protein, e.g., HSA.

[0379] A lipid based ligand can be used to modulate, e.g., control the binding of the conjugate to a target tissue. For example, a lipid or lipid-based ligand that binds to HSA more strongly will be less likely to be targeted to the kidney and therefore less likely to be cleared from the body. A lipid or lipid-based ligand that binds to HSA less strongly can be used to target the conjugate to the kidney.

[0380] In a preferred embodiment, the lipid based ligand binds HSA. Preferably, it binds HSA with a sufficient affinity such that the conjugate will be preferably distributed to a non-kidney tissue. However, it is preferred that the affinity not be so strong that the HSA-ligand binding cannot be reversed.

[0381] In another preferred embodiment, the lipid based ligand binds HSA weakly or not at all, such that the conjugate will be preferably distributed to the kidney. Other moieties that target to kidney cells can also be used in place of or in addition to the lipid based ligand.

[0382] In another aspect, the ligand is a moiety, e.g., a vitamin, which is taken up by a target cell, e.g., a proliferating cell. These are particularly useful for treating disorders characterized by unwanted cell proliferation, e.g., of the malignant or non-malignant type, e.g., cancer cells. Exemplary vitamins include vitamin A, E, and K. Other exemplary vitamins include B vitamins, e.g., folic acid, B12, riboflavin, biotin, pyridoxal or other vitamins or nutrients taken up by cancer cells. Also included are HAS, low density lipoprotein (LDL) and high-density lipoprotein (HDL).

[0383] In another aspect, the ligand is a cell-permeation agent, preferably a helical cell-permeation agent. Preferably, the agent is amphipathic. An exemplary agent is a peptide such as tat or antennopedia. If the agent is a peptide, it can be modified, including a peptidylmimetic, invertomers, non-peptide or pseudo-peptide linkages, and use of D-amino acids. The helical agent is preferably an alpha-helical agent, which preferably has a lipophilic and a lipophobic phase.

[0384] The ligand can be a peptide or peptidomimetic. A peptidomimetic (also referred to herein as an oligopeptidomimetic) is a molecule capable of folding into a defined three-dimensional structure similar to a natural peptide. The peptide or peptidomimetic moiety can be about 5-50 amino acids long, e.g., about 5, 10, 15, 20, 25, 30, 35, 40, 45, or 50 amino acids long. A peptide or peptidomimetic can be, for example, a cell permeation peptide, cationic peptide, amphipathic peptide, or hydrophobic peptide (e.g., consisting primarily of Tyr, Trp or Phe). The peptide moiety can be a dendrimer peptide, constrained peptide or crosslinked peptide. In another alternative, the peptide moiety can include a hydrophobic membrane translocation sequence (MTS). An exemplary hydrophobic MTS-containing peptide is RFGF having the amino acid sequence AAVALLPAVLLALLAP (SEQ ID NO: 11). An RFGF analogue (e.g., amino acid sequence AALLPVLLAAP (SEQ ID NO: 12)) containing a hydrophobic MTS can also be a targeting moiety. The peptide moiety can be a “delivery” peptide, which can carry large polar molecules including peptides, oligonucleotides, and protein across cell membranes. For example, sequences from the HIV Tat protein (GRKKRRQRRRPPQ) (SEQ ID NO: 13) and the Drosophila Antennapedia protein (RQIKIWFQNRRMKWKK) (SEQ ID NO: 14) have been found to be capable of functioning as delivery peptides. A peptide or peptidomimetic can be encoded by a random sequence of DNA, such as a peptide identified from a phage-display library, or one-bead-one-compound (OBOC) combinatorial library (Lam et al., Nature, 354:82-84, 1991). Preferably the peptide or peptidomimetic tethered to an iRNA agent via an incorporated monomer unit is a cell targeting peptide such as an arginine-glycine-aspartic acid (RGD)-peptide, or RGD mimic. A peptide moiety can range in length from about 5 amino acids to about 40 amino acids. The peptide moieties can have a structural modification, such as to increase stability or direct conformational properties. Any of the structural modifications described below can be utilized. An RGD peptide moiety can be used to target a tumor cell, such as an endothelial tumor cell or a breast cancer tumor cell (Zitzmann et al., Cancer Res., 62:5139-43, 2002). An RGD peptide can facilitate targeting of an iRNA agent to tumors of a variety of other tissues, including the lung, kidney, spleen, or liver (Aoki et al., Cancer Gene Therapy 8:783-787, 2001). Preferably, the RGD peptide will facilitate targeting of an iRNA agent to the kidney. The RGD peptide can be linear or cyclic, and can be modified, e.g., glycosylated or methylated to facilitate targeting to specific tissues. For example, a glycosylated RGD peptide can deliver an iRNA agent to a tumor cell expressing α_{V}β₃ (Haubner et al., Jour. Nucl. Med., 42:326-336, 2001). Peptides that target markers enriched in proliferating cells can be used. For example, RGD containing peptides and peptidomimetics can target cancer cells, in particular cells that exhibit an integrin. Thus, one could use RGD peptides, cyclic peptides containing RGD, RGD peptides that include D-amino acids, as well as synthetic RGD mimics. In addition to RGD, one can use other moieties that target the integrin ligand. Generally, such ligands can be used to control proliferating cells and angiogeneis. Preferred conjugates of this type of ligand target PECAM-1, VEGF, or other cancer gene, e.g., a cancer gene described herein.

[0385] A “cell permeation peptide” is capable of permeating a cell, e.g., a microbial cell, such as a bacterial or fungal cell, or a mammalian cell, such as a human cell. A microbial cell-permeating peptide can be, for example, an α-helical linear peptide (e.g., LL-37 or Ceropin P1), a disulfide bond-containing peptide (e.g., α-defensin, β-defensin or bactenecin), or a peptide containing only one or two dominating amino acids (e.g., PR-39 or indolicidin). A cell permeation peptide can also include a nuclear localization signal (NLS). For example, a cell permeation peptide can be a bipartite amphipathic peptide, such as MPG, which is derived from the fusion peptide domain of HIV-1 gp41 and the NLS of SV40 large T antigen (Simconi et al., Nucl. Acids Res. 31:2717-2724, 2003).

[0386] In one embodiment, a targeting peptide can be an amphipathic α-helical peptide. Exemplary amphipathic α-helical peptides include, but are not limited to, cecropins, lycotoxins, paradaxins, buforin, CPF, bombinin-like peptide (BLP), catholicidins, ceratotoxins, S. clava peptides, hagfish intestinal antimicrobial peptides (HFIAPs), magainines, brevinins-2, dermaseptins, melittins, pleurocidin, H2A peptides, Xenopus peptides, esculentinis-1, and cacrins. A number of factors will preferably be considered to maintain the integrity of helix stability. For example, a maximum number of helix stabilization residues will be utilized (e.g., leu, ala, or lys), and a minimum number helix destabilization residues will be utilized (e.g., proline, or cyclic monomeric units. The capping residue will be considered (for example Gly is an exemplary N-capping residue and/or C-terminal amidation can be used to provide an extra H-bond to stabilize the helix. Formation of salt bridges between residues with opposite charges, separated by i±3, or i±4 positions can provide stability. For example, cationic residues such as lysine, arginine, homo-arginine, ornithine or histidine can form salt bridges with the anionic residues glutamate or aspartate.

[0387] Peptide and peptidomimetic ligands include those having naturally occurring or modified peptides, e.g., D or L peptides; α, β, or γ peptides; N-methyl peptides; azapeptides; peptides having one or more amide, i.e., peptide, linkages replaced with one or more urea, thiourea, carbamate, or sulfonyl urea linkages; or cyclic peptides.

[0388] The targeting ligand can be any ligand that is capable of targeting a specific receptor. Examples are: folate, GalNAc, galactose, mannose, mannose-6P, clusters of sugars such as GalNAc cluster, mannose cluster, galactose cluster, or an apatamer. A cluster is a combination of two or more sugar units. The targeting ligands also include integrin receptor ligands, Chemokine receptor ligands, transferrin, biotin, serotonin receptor ligands, PSMA, endothelin, GCPII, somatostatin, LDL and HDL ligands. The ligands can also be based on nucleic acid, e.g., an aptamer. The aptamer can be unmodified or have any combination of modifications disclosed herein.

[0389] Endosomal release agents include imidazoles, poly or oligoimidazoles, PEIs, peptides, fusogenic peptides, polycaboxylates, polyacations, masked oligo or poly cations or anions, acctals, polyacetals, ketals/polyketyals, orthoesters, polymers with masked or unmasked cationic or anionic charges, dendrimers with masked or unmasked cationic or anionic charges.

[0390] PK modulator stands for pharmacokinetic modulator. PK modulators include lipophiles, bile acids, steroids, phospholipid analogues, peptides, protein binding agents, PEG, vitamins etc. Examplary PK modulators include, but are not limited to, cholesterol, fatty acids, cholic acid, lithocholic acid, dialkylglycerides, diacylglyceride, phospholipids, sphingolipids, naproxen, ibuprofen, vitamin E, biotin etc. Oligonucleotides that comprise a number of phosphorothioate linkages are also known to bind to serum protein, thus short oligonucleotides, e.g., oligonucleotides of about 5 bases, 10 bases, 15 bases or 20 bases, comprising multiple phosphorothioate linkages in the backbaone are also amenable to the present invention as ligands (e.g., as PK modulating ligands).

[0391] In addition, aptamers that bind serum components (e.g., serum proteins) are also amenable to the present invention as PK modulating ligands.

[0392] Other ligand conjugates amenable to the invention are described in U.S. Patent Applications U.S. Ser. No. 10/916,185, filed Aug. 10, 2004; U.S. Ser. No. 10/946,873, filed Sep. 21, 2004; U.S. Ser. No. 10/833,934, filed Aug. 3, 2007; U.S. Ser. No. 11/115,989 filed Apr. 27, 2005 and U.S. Ser. No. 11/944,227 filed Nov. 21, 2007, which are incorporated by reference in their entireties for all purposes.

[0393] When two or more ligands are present, the ligands can all have same properties, all have different properties or some ligands have the same properties while others have different properties. For example, a ligand can have targeting properties, have endosomolytic activity or have PK modulating properties. In a preferred embodiment, all the ligands have different properties.

[0394] Ligands can be coupled to the oligonucleotides at various places, for example, 3′-end, 5′-end, and/or at an internal position. In preferred embodiments, the ligand is attached to the oligonucleotides via an intervening tether, e.g., a carrier described herein. The ligand or tethered ligand may be present on a monomer when the monomer is incorporated into the growing strand. In some embodiments, the ligand may be incorporated via coupling to a “precursor” monomer after the “precursor” monomer has been incorporated into the growing strand. For example, a monomer having, e.g., an amino-terminated tether (i.e., having no associated ligand), e.g., TAP-(CH₂)ₙNH₂ may be incorporated into a growing oligonucleotide strand. In a subsequent operation, i.e., after incorporation of the precursor monomer into the strand, a ligand having an electrophilic group, e.g., a pentafluorophenyl ester or aldehyde group, can subsequently be attached to the precursor monomer by coupling the electrophilic group of the ligand with the terminal nucleophilic group of the precursor monomer's tether.

[0395] In another example, a monomer having a chemical group suitable for taking part in Click Chemistry reaction may be incorporated, e.g., an azide or alkyne terminated tether/linker. In a subsequent operation, i.e., after incorporation of the precursor monomer into the strand, a ligand having complementary chemical group, e.g. an alkyne or azide can be attached to the precursor monomer by coupling the alkyne and the azide together.

[0396] For double-stranded oligonucleotides, ligands can be attached to one or both strands. In some embodiments, a double-stranded iRNA agent contains a ligand conjugated to the sense strand. In other embodiments, a double-stranded iRNA agent contains a ligand conjugated to the antisense strand.

[0397] In some embodiments, ligand can be conjugated to nucleobases, sugar moieties, or internucleosidic linkages of nucleic acid molecules. Conjugation to purine nucleobases or derivatives thereof can occur at any position including, endocyclic and exocyclic atoms. In some embodiments, the 2-, 6-, 7-, or 8-positions of a purine nucleobase are attached to a conjugate moiety. Conjugation to pyrimidine nucleobases or derivatives thereof can also occur at any position. In some embodiments, the 2-, 5-, and 6-positions of a pyrimidine nucleobase can be substituted with a conjugate moiety. Conjugation to sugar moieties of nucleosides can occur at any carbon atom. Example carbon atoms of a sugar moiety that can be attached to a conjugate moiety include the 2′, 3′, and 5′ carbon atoms. The 1′ position can also be attached to a conjugate moiety, such as in an abasic residue. Internucleosidic linkages can also bear conjugate moieties. For phosphorus-containing linkages (e.g., phosphodiester, phosphorothioate, phosphorodithiotate, phosphoroamidate, and the like), the conjugate moiety can be attached directly to the phosphorus atom or to an O, N, or S atom bound to the phosphorus atom. For amine- or amide-containing internucleosidic linkages (e.g., PNA), the conjugate moiety can be attached to the nitrogen atom of the amine or amide or to an adjacent carbon atom.

[0398] Any suitable ligand in the field of RNA interference may be used, although the ligand is typically a carbohydrate e.g. monosaccharide (such as GalNAc), disaccharide, trisaccharide, tetrasaccharide, polysaccharide.

[0399] Linkers that conjugate the ligand to the nucleic acid include those discussed above. For example, the ligand can be one or more GalNAc (N-acetylglucosamine) derivatives attached through a bivalent or trivalent branched linker.

[0400] In one embodiment, the dsRNA of the invention is conjugated to a bivalent and trivalent branched linkers include the structures shown in any of formula (IV)-(VII):

[chemical structure]

wherein:
[0401] q^{2A}, q^{2B}, q^{3A}, q^{3B}, q^{4A}, q^{4B}, q^{5A}, q^{5B} and q^{5C} represent independently for each occurrence 0-20 and wherein the repeating unit can be the same or different;
   p^{2A}, p^{2B}, p^{3A}, p^{3B}, p^{4A}, p^{4B}, p^{5A}, p^{5B}, p^{5C}, T^{2A}, T^{2B}, T^{3A}, T^{3B}, T^{4A}, T^{4B}, T^{4A}, T^{5B}, T^{5C} are each independently for each occurrence absent, CO, NH, O, S, OC(O), NHC(O), CH₂, CH₂NH or CH₂O;
[0402] Q^{2A}, Q^{2B}, Q^{3A}, Q^{3B}, Q^{4A}, Q^{4B}, Q^{5A}, Q^{5B}, Q^{5C} are independently for each occurrence absent, alkylene, substituted alkylene wherein one or more methylenes can be interrupted or terminated by one or more of O, S, S(O), SO₂, N(RN), C(R′)═C(R″), C═C or C(O);
[0403] R^{2A}, R^{2B}, R^{3A}, R^{3B}, R^{4A}, R^{4B}, R^{5A}, R^{5B}, R^{5C} are each independently for each occurrence absent, NH, O, S, CH₂, C(O)O, C(O)NH, NHCH(R^{a})C(O), —C(O)—CH(R^{a})—NH—, CO, CH═N—O,

[chemical structure]

or heterocyclyl;
[0404] L^{2A}, L^{2B}, L^{3A}, L^{3B}, L^{4A}, L^{4B}, L^{5A}, L^{5B} and L^{5C} represent the ligand; i.e. each independently for each occurrence a monosaccharide (such as GalNAc), disaccharide, trisaccharide, tetrasaccharide, oligosaccharide, or polysaccharide; and
[0405] R^{a} is H or amino acid side chain.

[0406] Trivalent conjugating GalNAc derivatives are particularly useful for use with RNAi agents for inhibiting the expression of a target gene, such as those of formula (VII):

[chemical structure]

[0407] wherein L^{5A}, L^{5B} and L^{5C} represent a monosaccharide, such as GalNAc derivative. Examples of suitable bivalent and trivalent branched linker groups conjugating GalNAc derivatives include, but are not limited to, the following compounds:

[chemical structure]

[chemical structure]

[chemical structure]

[0408] In other embodiments, the RNAi agent for use in the methods of the invention is AD-59743.

### III. Delivery of an iRNA of the Invention

[0409] The delivery of an iRNA agent of the invention to a cell e.g., a cell within a subject, such as a human subject (e.g., a subject in need thereof, such as a subject having a TMPRSS6 associated disorder, such as a hemochromatosis) can be achieved in a number of different ways. For example, delivery may be performed by contacting a cell with an iRNA of the invention either in vitro or in vivo. In vivo delivery may also be performed directly by administering a composition comprising an iRNA, e.g., a dsRNA, to a subject. Alternatively, in vivo delivery may be performed indirectly by administering one or more vectors that encode and direct the expression of the iRNA. These alternatives are discussed further below.

[0410] In general, any method of delivering a nucleic acid molecule (in vitro or in vivo) can be adapted for use with an iRNA of the invention (see e.g., Akhtar S. and Julian R L. (1992) Trends Cell. Biol. 2(5): 139-144 and WO94/02595, which are incorporated herein by reference in their entireties). For in vivo delivery, factors to consider in order to deliver an iRNA molecule include, for example, biological stability of the delivered molecule, prevention of non-specific effects, and accumulation of the delivered molecule in the target tissue. The non-specific effects of an iRNA can be minimized by local administration, for example, by direct injection or implantation into a tissue or topically administering the preparation. Local administration to a treatment site maximizes local concentration of the agent, limits the exposure of the agent to systemic tissues that can otherwise be harmed by the agent or that can degrade the agent, and permits a lower total dose of the iRNA molecule to be administered. Several studies have shown successful knockdown of gene products when an iRNA is administered locally. For example, intraocular delivery of a VEGF dsRNA by intravitreal injection in cynomolgus monkeys (Tolentino, M J., et al (2004) Retina 24:132-138) and subretinal injections in mice (Reich, S J., et al (2003) Mol. Vis. 9:210-216) were both shown to prevent neovascularization in an experimental model of age-related macular degeneration. In addition, direct intratumoral injection of a dsRNA in mice reduces tumor volume (Pille, J., et al (2005) Mol. Ther.11:267-274) and can prolong survival of tumor-bearing mice (Kim, W J., et al (2006) Mol. Ther. 14:343-350; Li, S., et al (2007) Mol. Ther. 15:515-523). RNA interference has also shown success with local delivery to the CNS by direct injection (Dorn, G., et al. (2004) Nucleic Acids 32:c49; Tan, PH., et al (2005) Gene Ther. 12:59-66; Makimura, H., et al (2002) BMC Neurosci. 3:18; Shishkina, G T., et al (2004) Neuroscience 129:521-528; Thakker, E R., et al (2004) Proc. Natl. Acad. Sci. U.S.A. 101:17270-17275; Akancya, Y., et al (2005) J. Neurophysiol. 93:594-602) and to the lungs by intranasal administration (Howard, K A., et al (2006) Mol. Ther. 14:476-484; Zhang, X., et al (2004) J. Biol. Chem. 279:10677-10684; Bitko, V., et al (2005) Nat. Med. 11:50-55). For administering an iRNA systemically for the treatment of a disease, the RNA can be modified or alternatively delivered using a drug delivery system; both methods act to prevent the rapid degradation of the dsRNA by endo- and exo-nucleases in vivo. Modification of the RNA or the pharmaceutical carrier can also permit targeting of the iRNA composition to the target tissue and avoid undesirable off-target effects. iRNA molecules can be modified by chemical conjugation to lipophilic groups such as cholesterol to enhance cellular uptake and prevent degradation. For example, an iRNA directed against ApoB conjugated to a lipophilic cholesterol moiety was injected systemically into mice and resulted in knockdown of apoB mRNA in both the liver and jejunum (Soutschek, J., et al (2004) Nature 432:173-178). Conjugation of an iRNA to an aptamer has been shown to inhibit tumor growth and mediate tumor regression in a mouse model of prostate cancer (McNamara, J O., et al (2006) Nat. Biotechnol. 24:1005-1015). In an alternative embodiment, the iRNA can be delivered using drug delivery systems such as a nanoparticle, a dendrimer, a polymer, liposomes, or a cationic delivery system. Positively charged cationic delivery systems facilitate binding of an iRNA molecule (negatively charged) and also enhance interactions at the negatively charged cell membrane to permit efficient uptake of an iRNA by the cell. Cationic lipids, dendrimers, or polymers can either be bound to an iRNA, or induced to form a vesicle or micelle (see e.g., Kim S H., et al (2008) Journal of Controlled Release 129(2): 107-116) that encases an iRNA. The formation of vesicles or micelles further prevents degradation of the iRNA when administered systemically. Methods for making and administering cationic-iRNA complexes are well within the abilities of one skilled in the art (see e.g., Sorensen, D R., et al (2003) J. Mol. Biol 327:761-766; Verma, U N., et al (2003) Clin. Cancer Res. 9:1291-1300; Arnold, A S et al (2007) J. Hypertens. 25:197-205, which are incorporated herein by reference in their entirety). Some non-limiting examples of drug delivery systems useful for systemic delivery of iRNAs include DOTAP (Sorensen, D R., et al (2003), supra; Verma, U N., et al (2003), supra), Oligofectamine, “solid nucleic acid lipid particles” (Zimmermann, T S., et al (2006) Nature 441:111-114), cardiolipin (Chien, P Y., et al (2005) Cancer Gene Ther. 12:321-328; Pal, A., et al (2005) Int J. Oncol. 26:1087-1091), polyethyleneimine (Bonnet M E., et al (2008) Pharm. Res. August 16 Epub ahead of print; Aigner, A. (2006) J. Biomed. Biotechnol. 71659), Arg-Gly-Asp (RGD) peptides (Liu, S. (2006) Mol. Pharm. 3:472-487), and polyamidoamines (Tomalia, D A., et al (2007) Biochem. Soc. Trans. 35:61-67; Yoo, H., et al (1999) Pharm. Res. 16:1799-1804). In some embodiments, an iRNA forms a complex with cyclodextrin for systemic administration. Methods for administration and pharmaceutical compositions of iRNAs and cyclodextrins can be found in U.S. Pat. No. 7,427,605, which is herein incorporated by reference in its entirety.

A. Vector Encoded iRNAs of the Invention

[0411] iRNA targeting the TMPRSS6 gene can be expressed from transcription units inserted into DNA or RNA vectors (see, e.g., Couture, A, et al., TIG. (1996), 12:5-10; Skillern, A., et al., International PCT Publication No. WO 00/22113, Conrad, International PCT Publication No. WO 00/22114, and Conrad, U.S. Pat. No. 6,054,299). Expression can be transient (on the order of hours to weeks) or sustained (weeks to months or longer), depending upon the specific construct used and the target tissue or cell type. These transgenes can be introduced as a linear construct, a circular plasmid, or a viral vector, which can be an integrating or non-integrating vector. The transgene can also be constructed to permit it to be inherited as an extrachromosomal plasmid (Gassmann, et al., Proc. Natl. Acad. Sci. USA (1995) 92:1292).

[0412] The individual strand or strands of an iRNA can be transcribed from a promoter on an expression vector. Where two separate strands are to be expressed to generate, for example, a dsRNA, two separate expression vectors can be co-introduced (e.g., by transfection or infection) into a target cell. Alternatively each individual strand of a dsRNA can be transcribed by promoters both of which are located on the same expression plasmid. In one embodiment, a dsRNA is expressed as inverted repeat polynucleotides joined by a linker polynucleotide sequence such that the dsRNA has a stem and loop structure.

[0413] iRNA expression vectors are generally DNA plasmids or viral vectors. Expression vectors compatible with eukaryotic cells, preferably those compatible with vertebrate cells, can be used to produce recombinant constructs for the expression of an iRNA as described herein. Eukaryotic cell expression vectors are well known in the art and are available from a number of commercial sources. Typically, such vectors are provided containing convenient restriction sites for insertion of the desired nucleic acid segment. Delivery of iRNA expressing vectors can be systemic, such as by intravenous or intramuscular administration, by administration to target cells ex-planted from the patient followed by reintroduction into the patient, or by any other means that allows for introduction into a desired target cell.

[0414] iRNA expression plasmids can be transfected into target cells as a complex with cationic lipid carriers (e.g., Oligofectamine) or non-cationic lipid-based carriers (e.g., Transit-TKO™). Multiple lipid transfections for iRNA-mediated knockdowns targeting different regions of a target RNA over a period of a week or more are also contemplated by the invention. Successful introduction of vectors into host cells can be monitored using various known methods. For example, transient transfection can be signaled with a reporter, such as a fluorescent marker, such as Green Fluorescent Protein (GFP). Stable transfection of cells ex vivo can be ensured using markers that provide the transfected cell with resistance to specific environmental factors (e.g., antibiotics and drugs), such as hygromycin B resistance.

[0415] Viral vector systems which can be utilized with the methods and compositions described herein include, but are not limited to, (a) adenovirus vectors; (b) retrovirus vectors, including but not limited to lentiviral vectors, moloney murine leukemia virus, etc.; (c) adeno-associated virus vectors; (d) herpes simplex virus vectors; (c) SV 40 vectors; (f) polyoma virus vectors; (g) papilloma virus vectors; (h) picornavirus vectors; (i) pox virus vectors such as an orthopox, e.g., vaccinia virus vectors or avipox, e.g. canary pox or fowl pox; and (j) a helper-dependent or gutless adenovirus. Replication-defective viruses can also be advantageous. Different vectors will or will not become incorporated into the cells' genome. The constructs can include viral sequences for transfection, if desired. Alternatively, the construct can be incorporated into vectors capable of episomal replication, e.g. EPV and EBV vectors. Constructs for the recombinant expression of an iRNA will generally require regulatory elements, e.g., promoters, enhancers, etc., to ensure the expression of the iRNA in target cells. Other aspects to consider for vectors and constructs are further described below.

[0416] Vectors useful for the delivery of an iRNA will include regulatory elements (promoter, enhancer, etc.) sufficient for expression of the iRNA in the desired target cell or tissue. The regulatory elements can be chosen to provide either constitutive or regulated/inducible expression.

[0417] Expression of the iRNA can be precisely regulated, for example, by using an inducible regulatory sequence that is sensitive to certain physiological regulators, e.g., circulating glucose levels, or hormones (Docherty et al., 1994, FASEB J. 8:20-24). Such inducible expression systems, suitable for the control of dsRNA expression in cells or in mammals include, for example, regulation by ecdysone, by estrogen, progesterone, tetracycline, chemical inducers of dimerization, and isopropyl-beta-D1-thiogalactopyranoside (IPTG). A person skilled in the art would be able to choose the appropriate regulatory/promoter sequence based on the intended use of the iRNA transgene.

[0418] Viral vectors that contain nucleic acid sequences encoding an iRNA can be used. For example, a retroviral vector can be used (see Miller et al., Meth. Enzymol. 217:581-599 (1993)). These retroviral vectors contain the components necessary for the correct packaging of the viral genome and integration into the host cell DNA. The nucleic acid sequences encoding an iRNA are cloned into one or more vectors, which facilitate delivery of the nucleic acid into a patient. More detail about retroviral vectors can be found, for example, in Boesen et al., Biotherapy 6:291-302 (1994), which describes the use of a retroviral vector to deliver the mdr1 gene to hematopoictic stem cells in order to make the stem cells more resistant to chemotherapy. Other references illustrating the use of retroviral vectors in gene therapy are: Clowes et al., J. Clin. Invest. 93:644-651 (1994); Kiem et al., Blood 83:1467-1473 (1994); Salmons and Gunzberg, Human Gene Therapy 4:129-141 (1993); and Grossman and Wilson, Curr. Opin. in Genetics and Devel. 3:110-114 (1993). Lentiviral vectors contemplated for use include, for example, the HIV based vectors described in U.S. Pat. Nos. 6,143,520; 5,665,557; and 5,981,276, which are herein incorporated by reference.

[0419] Adenoviruses are also contemplated for use in delivery of iRNAs of the invention. Adenoviruses are especially attractive vehicles, e.g., for delivering genes to respiratory epithelia. Adenoviruses naturally infect respiratory epithelia where they cause a mild disease. Other targets for adenovirus-based delivery systems are liver, the central nervous system, endothelial cells, and muscle. Adenoviruses have the advantage of being capable of infecting non-dividing cells. Kozarsky and Wilson, Current Opinion in Genetics and Development 3:499-503 (1993) present a review of adenovirus-based gene therapy. Bout et al., Human Gene Therapy 5:3-10 (1994) demonstrated the use of adenovirus vectors to transfer genes to the respiratory epithelia of rhesus monkeys. Other instances of the use of adenoviruses in gene therapy can be found in Rosenfeld et al., Science 252:431-434 (1991); Rosenfeld et al., Cell 68: 143-155 (1992); Mastrangeli et al., J. Clin. Invest. 91:225-234 (1993); PCT Publication WO94/12649; and Wang, et al., Gene Therapy 2:775-783 (1995). A suitable AV vector for expressing an iRNA featured in the invention, a method for constructing the recombinant AV vector, and a method for delivering the vector into target cells, are described in Xia H et al. (2002), Nat. Biotech. 20: 1006-1010.

[0420] Adeno-associated virus (AAV) vectors may also be used to delivery an iRNA of the invention (Walsh et al., Proc. Soc. Exp. Biol. Med. 204:289-300 (1993); U.S. Pat. No. 5,436,146). In one embodiment, the iRNA can be expressed as two separate, complementary single-stranded RNA molecules from a recombinant AAV vector having, for example, either the U6 or H1 RNA promoters, or the cytomegalovirus (CMV) promoter. Suitable AAV vectors for expressing the dsRNA featured in the invention, methods for constructing the recombinant AV vector, and methods for delivering the vectors into target cells are described in Samulski R et al. (1987), J. Virol. 61: 3096-3101; Fisher K J et al. (1996), J. Virol, 70: 520-532; Samulski R et al. (1989), J. Virol. 63: 3822-3826; U.S. Pat. Nos. 5,252,479; 5,139,941; International Patent Application No. WO 94/13788; and International Patent Application No. WO 93/24641, the entire disclosures of which are herein incorporated by reference.

[0421] Another viral vector suitable for delivery of an iRNA of the invention is a pox virus such as a vaccinia virus, for example an attenuated vaccinia such as Modified Virus Ankara (MVA) or NYVAC, an avipox such as fowl pox or canary pox.

[0422] The tropism of viral vectors can be modified by pseudotyping the vectors with envelope proteins or other surface antigens from other viruses, or by substituting different viral capsid proteins, as appropriate. For example, lentiviral vectors can be pseudotyped with surface proteins from vesicular stomatitis virus (VSV), rabies, Ebola, Mokola, and the like. AAV vectors can be made to target different cells by engineering the vectors to express different capsid protein serotypes; see, e.g., Rabinowitz J E et al. (2002), J Virol 76:791-801, the entire disclosure of which is herein incorporated by reference.

[0423] The pharmaceutical preparation of a vector can include the vector in an acceptable diluent, or can include a slow release matrix in which the gene delivery vehicle is imbedded. Alternatively, where the complete gene delivery vector can be produced intact from recombinant cells, e.g., retroviral vectors, the pharmaceutical preparation can include one or more cells which produce the gene delivery system.

### IV. Pharmaceutical Compositions of the Invention

[0424] The present invention also includes pharmaceutical compositions and formulations which include the iRNAs of the invention. In one embodiment, provided herein are pharmaceutical compositions containing an iRNA, as described herein, and a pharmaceutically acceptable carrier. The pharmaceutical compositions containing the iRNA are useful for treating a TMPRSS6 associated disease or disorder, e.g. hemochromatosis. Such pharmaceutical compositions are formulated based on the mode of delivery. One example is compositions that are formulated for systemic administration via parenteral delivery, e.g., by intravenous (IV) delivery. Another example is compositions that are formulated for direct delivery into the brain parenchyma, e.g., by infusion into the brain, such as by continuous pump infusion.

[0425] The pharmaceutical compositions comprising RNAi agents of the invention may be, for example, solutions with or without a buffer, or compositions containing pharmaceutically acceptable carriers. Such compositions include, for example, aqueous or crystalline compositions, liposomal formulations, micellar formulations, emulsions, and gene therapy vectors.

[0426] In the methods of the invention, the RNAi agent may be administered in a solution. A free RNAi agent may be administered in an unbuffered solution, e.g., in saline or in water. Alternatively, the free siRNA may also be administered in a suitable buffer solution. The buffer solution may comprise acetate, citrate, prolamine, carbonate, or phosphate, or any combination thereof. In a preferred embodiment, the buffer solution is phosphate buffered saline (PBS). The pH and osmolarity of the buffer solution containing the RNAi agent can be adjusted such that it is suitable for administering to a subject.

[0427] In some embodiments, the buffer solution further comprises an agent for controlling the osmolarity of the solution, such that the osmolarity is kept at a desired value, e.g., at the physiologic values of the human plasma. Solutes which can be added to the buffer solution to control the osmolarity include, but are not limited to, proteins, peptides, amino acids, non-metabolized polymers, vitamins, ions, sugars, metabolites, organic acids, lipids, or salts. In some embodiments, the agent for controlling the osmolarity of the solution is a salt. In certain embodiments, the agent for controlling the osmolarity of the solution is sodium chloride or potassium chloride.

[0428] The pharmaceutical compositions of the invention may be administered in dosages sufficient to inhibit expression of a TMPRSS6 gene.

[0429] In general, a suitable dose of an iRNA of the invention will be in the range of about 0.001 to about 200.0 milligrams per kilogram body weight of the recipient per day, generally in the range of about 1 to 50 mg per kilogram body weight per day. For example, the dsRNA can be administered at about 0.01 mg/kg, about 0.05 mg/kg, about 0.5 mg/kg, about 1 mg/kg, about 1.5 mg/kg, about 2 mg/kg, about 3 mg/kg, about 4 mg/kg, about 5 mg/kg, about 6 mg/kg, about 7 mg/kg, about 8 mg/kg, about 9 mg/kg about 10 mg/kg, about 20 mg/kg, about 30 mg/kg, about 40 mg/kg, or about 50 mg/kg per single dose.

[0430] For example, the RNAi agent, e.g., dsRNA, may be administered at a dose of about 0.1, 0.2, 0.3, 0.4, 0.5, 0.6, 0.7, 0.8, 0.9, 1, 1.1, 1.2, 1.3, 1.4, 1.5, 1.6, 1.7, 1.8, 1.9, 2, 2.1, 2.2, 2.3, 2.4, 2.5, 2.6, 2.7, 2.8, 2.9, 3, 3.1, 3.2, 3.3, 3.4, 3.5, 3.6, 3.7, 3.8, 3.9, 4, 4.1, 4.2, 4.3, 4.4, 4.5, 4.6, 4.7, 4.8, 4.9, 5, 5.1, 5.2, 5.3, 5.4, 5.5, 5.6, 5.7, 5.8, 5.9, 6, 6.1, 6.2, 6.3, 6.4, 6.5, 6.6, 6.7, 6.8, 6.9, 7, 7.1, 7.2, 7.3, 7.4, 7.5, 7.6, 7.7, 7.8, 7.9, 8, 8.1, 8.2, 8.3, 8.4, 8.5, 8.6, 8.7, 8.8, 8.9, 9, 9.1, 9.2, 9.3, 9.4, 9.5, 9.6, 9.7, 9.8, 9.9, or about 10 mg/kg. Values and ranges intermediate to the recited values are also intended to be part of this invention.

[0431] In another embodiment, the RNAi agent, e.g., dsRNA, is administered at a dose of about 0.1 to about 50 mg/kg, about 0.25 to about 50 mg/kg, about 0.5 to about 50 mg/kg, about 0.75 to about 50 mg/kg, about 1 to about 50 mg/mg, about 1.5 to about 50 mg/kb, about 2 to about 50 mg/kg, about 2.5 to about 50 mg/kg, about 3 to about 50 mg/kg, about 3.5 to about 50 mg/kg, about 4 to about 50 mg/kg, about 4.5 to about 50 mg/kg, about 5 to about 50 mg/kg, about 7.5 to about 50 mg/kg, about 10 to about 50 mg/kg, about 15 to about 50 mg/kg, about 20 to about 50 mg/kg, about 20 to about 50 mg/kg, about 25 to about 50 mg/kg, about 25 to about 50 mg/kg, about 30 to about 50 mg/kg, about 35 to about 50 mg/kg, about 40 to about 50 mg/kg, about 45 to about 50 mg/kg, about 0.1 to about 45 mg/kg, about 0.25 to about 45 mg/kg, about 0.5 to about 45 mg/kg, about 0.75 to about 45 mg/kg, about 1 to about 45 mg/mg, about 1.5 to about 45 mg/kb, about 2 to about 45 mg/kg, about 2.5 to about 45 mg/kg, about 3 to about 45 mg/kg, about 3.5 to about 45 mg/kg, about 4 to about 45 mg/kg, about 4.5 to about 45 mg/kg, about 5 to about 45 mg/kg, about 7.5 to about 45 mg/kg, about 10 to about 45 mg/kg, about 15 to about 45 mg/kg, about 20 to about 45 mg/kg, about 20 to about 45 mg/kg, about 25 to about 45 mg/kg, about 25 to about 45 mg/kg, about 30 to about 45 mg/kg, about 35 to about 45 mg/kg, about 40 to about 45 mg/kg, about 0.1 to about 40 mg/kg, about 0.25 to about 40 mg/kg, about 0.5 to about 40 mg/kg, about 0.75 to about 40 mg/kg, about 1 to about 40 mg/mg, about 1.5 to about 40 mg/kb, about 2 to about 40 mg/kg, about 2.5 to about 40 mg/kg, about 3 to about 40 mg/kg, about 3.5 to about 40 mg/kg, about 4 to about 40 mg/kg, about 4.5 to about 40 mg/kg, about 5 to about 40 mg/kg, about 7.5 to about 40 mg/kg, about 10 to about 40 mg/kg, about 15 to about 40 mg/kg, about 20 to about 40 mg/kg, about 20 to about 40 mg/kg, about 25 to about 40 mg/kg, about 25 to about 40 mg/kg, about 30 to about 40 mg/kg, about 35 to about 40 mg/kg, about 0.1 to about 30 mg/kg, about 0.25 to about 30 mg/kg, about 0.5 to about 30 mg/kg, about 0.75 to about 30 mg/kg, about 1 to about 30 mg/mg, about 1.5 to about 30 mg/kb, about 2 to about 30 mg/kg, about 2.5 to about 30 mg/kg, about 3 to about 30 mg/kg, about 3.5 to about 30 mg/kg, about 4 to about 30 mg/kg, about 4.5 to about 30 mg/kg, about 5 to about 30 mg/kg, about 7.5 to about 30 mg/kg, about 10 to about 30 mg/kg, about 15 to about 30 mg/kg, about 20 to about 30 mg/kg, about 20 to about 30 mg/kg, about 25 to about 30 mg/kg, about 0.1 to about 20 mg/kg, about 0.25 to about 20 mg/kg, about 0.5 to about 20 mg/kg, about 0.75 to about 20 mg/kg, about 1 to about 20 mg/mg, about 1.5 to about 20 mg/kb, about 2 to about 20 mg/kg, about 2.5 to about 20 mg/kg, about 3 to about 20 mg/kg, about 3.5 to about 20 mg/kg, about 4 to about 20 mg/kg, about 4.5 to about 20 mg/kg, about 5 to about 20 mg/kg, about 7.5 to about 20 mg/kg, about 10 to about 20 mg/kg, or about 15 to about 20 mg/kg. Values and ranges intermediate to the recited values are also intended to be part of this invention.

[0432] For example, the RNAi agent, e.g., dsRNA, may be administered at a dose of about 0 . . . 01, 0.02, 0.03, 0.04, 0.05, 0.06, 0.07, 0.08, 0.09, 0.1, 0.2, 0.3, 0.4, 0.5, 0.6, 0.7, 0.8, 0.9, 1, 1.1, 1.2, 1.3, 1.4, 1.5, 1.6, 1.7, 1.8, 1.9, 2, 2.1, 2.2, 2.3, 2.4, 2.5, 2.6, 2.7, 2.8, 2.9, 3, 3.1, 3.2, 3.3, 3.4, 3.5, 3.6, 3.7, 3.8, 3.9, 4, 4.1, 4.2, 4.3, 4.4, 4.5, 4.6, 4.7, 4.8, 4.9, 5, 5.1, 5.2, 5.3, 5.4, 5.5, 5.6, 5.7, 5.8, 5.9, 6, 6.1, 6.2, 6.3, 6.4, 6.5, 6.6, 6.7, 6.8, 6.9, 7, 7.1, 7.2, 7.3, 7.4, 7.5, 7.6, 7.7, 7.8, 7.9, 8, 8.1, 8.2, 8.3, 8.4, 8.5, 8.6, 8.7, 8.8, 8.9, 9, 9.1, 9.2, 9.3, 9.4, 9.5, 9.6, 9.7, 9.8, 9.9, or about 10 mg/kg. Values and ranges intermediate to the recited values are also intended to be part of this invention.

[0433] In another embodiment, the RNAi agent, e.g., dsRNA, is administered at a dose of about 0.5 to about 50 mg/kg, about 0.75 to about 50 mg/kg, about 1 to about 50 mg/mg, about 1.5 to about 50 mg/kg, about 2 to about 50 mg/kg, about 2.5 to about 50 mg/kg, about 3 to about 50 mg/kg, about 3.5 to about 50 mg/kg, about 4 to about 50 mg/kg, about 4.5 to about 50 mg/kg, about 5 to about 50 mg/kg, about 7.5 to about 50 mg/kg, about 10 to about 50 mg/kg, about 15 to about 50 mg/kg, about 20 to about 50 mg/kg, about 20 to about 50 mg/kg, about 25 to about 50 mg/kg, about 25 to about 50 mg/kg, about 30 to about 50 mg/kg, about 35 to about 50 mg/kg, about 40 to about 50 mg/kg, about 45 to about 50 mg/kg, about 0.5 to about 45 mg/kg, about 0.75 to about 45 mg/kg, about 1 to about 45 mg/mg, about 1.5 to about 45 mg/kb, about 2 to about 45 mg/kg, about 2.5 to about 45 mg/kg, about 3 to about 45 mg/kg, about 3.5 to about 45 mg/kg, about 4 to about 45 mg/kg, about 4.5 to about 45 mg/kg, about 5 to about 45 mg/kg, about 7.5 to about 45 mg/kg, about 10 to about 45 mg/kg, about 15 to about 45 mg/kg, about 20 to about 45 mg/kg, about 20 to about 45 mg/kg, about 25 to about 45 mg/kg, about 25 to about 45 mg/kg, about 30 to about 45 mg/kg, about 35 to about 45 mg/kg, about 40 to about 45 mg/kg, about 0.5 to about 40 mg/kg, about 0.75 to about 40 mg/kg, about 1 to about 40 mg/mg, about 1.5 to about 40 mg/kb, about 2 to about 40 mg/kg, about 2.5 to about 40 mg/kg, about 3 to about 40 mg/kg, about 3.5 to about 40 mg/kg, about 4 to about 40 mg/kg, about 4.5 to about 40 mg/kg, about 5 to about 40 mg/kg, about 7.5 to about 40 mg/kg, about 10 to about 40 mg/kg, about 15 to about 40 mg/kg, about 20 to about 40 mg/kg, about 20 to about 40 mg/kg, about 25 to about 40 mg/kg, about 25 to about 40 mg/kg, about 30 to about 40 mg/kg, about 35 to about 40 mg/kg, about 0.5 to about 30 mg/kg, about 0.75 to about 30 mg/kg, about 1 to about 30 mg/mg, about 1.5 to about 30 mg/kb, about 2 to about 30 mg/kg, about 2.5 to about 30 mg/kg, about 3 to about 30 mg/kg, about 3.5 to about 30 mg/kg, about 4 to about 30 mg/kg, about 4.5 to about 30 mg/kg, about 5 to about 30 mg/kg, about 7.5 to about 30 mg/kg, about 10 to about 30 mg/kg, about 15 to about 30 mg/kg, about 20 to about 30 mg/kg, about 20 to about 30 mg/kg, about 25 to about 30 mg/kg, about 0.5 to about 20 mg/kg, about 0.75 to about 20 mg/kg, about 1 to about 20 mg/mg, about 1.5 to about 20 mg/kb, about 2 to about 20 mg/kg, about 2.5 to about 20 mg/kg, about 3 to about 20 mg/kg, about 3.5 to about 20 mg/kg, about 4 to about 20 mg/kg, about 4.5 to about 20 mg/kg, about 5 to about 20 mg/kg, about 7.5 to about 20 mg/kg, about 10 to about 20 mg/kg, or about 15 to about 20 mg/kg. In one embodiment, the dsRNA is administered at a dose of about 10 mg/kg to about 30 mg/kg. Values and ranges intermediate to the recited values are also intended to be part of this invention.

[0434] For example, subjects can be administered a therapeutic amount of iRNA, such as about 0.5, 0.6, 0.7, 0.8, 0.9, 1, 1.1, 1.2, 1.3, 1.4, 1.5, 1.6, 1.7, 1.8, 1.9, 2, 2.1, 2.2, 2.3, 2.4, 2.5, 2.6, 2.7, 2.8, 2.9, 3, 3.1, 3.2, 3.3, 3.4, 3.5, 3.6, 3.7, 3.8, 3.9, 4, 4.1, 4.2, 4.3, 4.4, 4.5, 4.6, 4.7, 4.8, 4.9, 5, 5.1, 5.2, 5.3, 5.4, 5.5, 5.6, 5.7, 5.8, 5.9, 6, 6.1, 6.2, 6.3, 6.4, 6.5, 6.6, 6.7, 6.8, 6.9, 7, 7.1, 7.2, 7.3, 7.4, 7.5, 7.6, 7.7, 7.8, 7.9, 8, 8.1, 8.2, 8.3, 8.4, 8.5, 8.6, 8.7, 8.8, 8.9, 9, 9.1, 9.2, 9.3, 9.4, 9.5, 9.6, 9.7, 9.8, 9.9, 10, 10.5, 11, 11.5, 12, 12.5, 13, 13.5, 14, 14.5, 15, 15.5, 16, 16.5, 17, 17.5, 18, 18.5, 19, 19.5, 20, 20.5, 21, 21.5, 22, 22.5, 23, 23.5, 24, 24.5, 25, 25.5, 26, 26.5, 27, 27.5, 28, 28.5, 29, 29.5, 30, 31, 32, 33, 34, 34, 35, 36, 37, 38, 39, 40, 41, 42, 43, 44, 45, 46, 47, 48, 49, or about 50 mg/kg. Values and ranges intermediate to the recited values are also intended to be part of this invention.

[0435] In certain embodiments, for example, when a composition of the invention comprises a dsRNA as described herein and a lipid, subjects can be administered a therapeutic amount of iRNA, such as about 0.01 mg/kg to about 5 mg/kg, about 0.01 mg/kg to about 10 mg/kg, about 0.05 mg/kg to about 5 mg/kg, about 0.05 mg/kg to about 10 mg/kg, about 0.1 mg/kg to about 5 mg/kg, about 0.1 mg/kg to about 10 mg/kg, about 0.2 mg/kg to about 5 mg/kg, about 0.2 mg/kg to about 10 mg/kg, about 0.3 mg/kg to about 5 mg/kg, about 0.3 mg/kg to about 10 mg/kg, about 0.4 mg/kg to about 5 mg/kg, about 0.4 mg/kg to about 10 mg/kg, about 0.5 mg/kg to about 5 mg/kg, about 0.5 mg/kg to about 10 mg/kg, about 1 mg/kg to about 5 mg/kg, about 1 mg/kg to about 10 mg/kg, about 1.5 mg/kg to about 5 mg/kg, about 1.5 mg/kg to about 10 mg/kg, about 2 mg/kg to about about 2.5 mg/kg, about 2 mg/kg to about 10 mg/kg, about 3 mg/kg to about 5 mg/kg, about 3 mg/kg to about 10 mg/kg, about 3.5 mg/kg to about 5 mg/kg, about 4 mg/kg to about 5 mg/kg, about 4.5 mg/kg to about 5 mg/kg, about 4 mg/kg to about 10 mg/kg, about 4.5 mg/kg to about 10 mg/kg, about 5 mg/kg to about 10 mg/kg, about 5.5 mg/kg to about 10 mg/kg, about 6 mg/kg to about 10 mg/kg, about 6.5 mg/kg to about 10 mg/kg, about 7 mg/kg to about 10 mg/kg, about 7.5 mg/kg to about 10 mg/kg, about 8 mg/kg to about 10 mg/kg, about 8.5 mg/kg to about 10 mg/kg, about 9 mg/kg to about 10 mg/kg, or about 9.5 mg/kg to about 10 mg/kg. Values and ranges intermediate to the recited values are also intended to be part of this invention. For example, the dsRNA may be administered at a dose of about 0.1, 0.2, 0.3, 0.4, 0.5, 0.6, 0.7, 0.8, 0.9, 1, 1.1, 1.2, 1.3, 1.4, 1.5, 1.6, 1.7, 1.8, 1.9, 2, 2.1, 2.2, 2.3, 2.4, 2.5, 2.6, 2.7, 2.8, 2.9, 3, 3.1, 3.2, 3.3, 3.4, 3.5, 3.6, 3.7, 3.8, 3.9, 4, 4.1, 4.2, 4.3, 4.4, 4.5, 4.6, 4.7, 4.8, 4.9, 5, 5.1, 5.2, 5.3, 5.4, 5.5, 5.6, 5.7, 5.8, 5.9, 6, 6.1, 6.2, 6.3, 6.4, 6.5, 6.6, 6.7, 6.8, 6.9, 7, 7.1, 7.2, 7.3, 7.4, 7.5, 7.6, 7.7, 7.8, 7.9, 8, 8.1, 8.2, 8.3, 8.4, 8.5, 8.6, 8.7, 8.8, 8.9, 9, 9.1, 9.2, 9.3, 9.4, 9.5, 9.6, 9.7, 9.8, 9.9, or about 10 mg/kg. Values and ranges intermediate to the recited values are also intended to be part of this invention.

[0436] In certain embodiments of the invention, for example, when a double-stranded RNAi agent includes modifications (e.g., one or more motifs of three identical modifications on three consecutive nucleotides, including one such motif at or near the cleavage site of the agent), six phosphorothioate linkages, and a ligand, such an agent is administered at a dose of about 0.01 to about 0.5 mg/kg, about 0.01 to about 0.4 mg/kg, about 0.01 to about 0.3 mg/kg, about 0.01 to about 0.2 mg/kg, about 0.01 to about 0.1 mg/kg, about 0.01 mg/kg to about 0.09 mg/kg, about 0.01 mg/kg to about 0.08 mg/kg, about 0.01 mg/kg to about 0.07 mg/kg, about 0.01 mg/kg to about 0.06 mg/kg, about 0.01 mg/kg to about 0.05 mg/kg, about 0.02 to about 0.5 mg/kg, about 0.02 to about 0.4 mg/kg, about 0.02 to about 0.3 mg/kg, about 0.02 to about 0.2 mg/kg, about 0.02 to about 0.1 mg/kg, about 0.02 mg/kg to about 0.09 mg/kg, about 0.02 mg/kg to about 0.08 mg/kg, about 0.02 mg/kg to about 0.07 mg/kg, about 0.02 mg/kg to about 0.06 mg/kg, about 0.02 mg/kg to about 0.05 mg/kg, about 0.03 to about 0.5 mg/kg, about 0.03 to about 0.4 mg/kg, about 0.03 to about 0.3 mg/kg, about 0.03 to about 0.2 mg/kg, about 0.03 to about 0.1 mg/kg, about 0.03 mg/kg to about 0.09 mg/kg, about 0.03 mg/kg to about 0.08 mg/kg, about 0.03 mg/kg to about 0.07 mg/kg, about 0.03 mg/kg to about 0.06 mg/kg, about 0.03 mg/kg to about 0.05 mg/kg, about 0.04 to about 0.5 mg/kg, about 0.04 to about 0.4 mg/kg, about 0.04 to about 0.3 mg/kg, about 0.04 to about 0.2 mg/kg, about 0.04 to about 0.1 mg/kg, about 0.04 mg/kg to about 0.09 mg/kg, about 0.04 mg/kg to about 0.08 mg/kg, about 0.04 mg/kg to about 0.07 mg/kg, about 0.04 mg/kg to about 0.06 mg/kg, about 0.05 to about 0.5 mg/kg, about 0.05 to about 0.4 mg/kg, about 0.05 to about 0.3 mg/kg, about 0.05 to about 0.2 mg/kg, about 0.05 to about 0.1 mg/kg, about 0.05 mg/kg to about 0.09 mg/kg, about 0.05 mg/kg to about 0.08 mg/kg, or about 0.05 mg/kg to about 0.07 mg/kg. Values and ranges intermediate to the foregoing recited values are also intended to be part of this invention, e.g., the RNAi agent may be administered to the subject at a dose of about 0.015 mg/kg to about 0.45 mg/mg.

[0437] For example, the RNAi agent, e.g., RNAi agent in a pharmaceutical composition, may be administered at a dose of about 0.01 mg/kg, 0.0125 mg/kg, 0.015 mg/kg, 0.0175 mg/kg, 0.02 mg/kg, 0.0225 mg/kg, 0.025 mg/kg, 0.0275 mg/kg, 0.03 mg/kg, 0.0325 mg/kg, 0.035 mg/kg, 0.0375 mg/kg, 0.04 mg/kg, 0.0425 mg/kg, 0.045 mg/kg, 0.0475 mg/kg, 0.05 mg/kg, 0.0525 mg/kg, 0.055 mg/kg, 0.0575 mg/kg, 0.06 mg/kg, 0.0625 mg/kg, 0.065 mg/kg, 0.0675 mg/kg, 0.07 mg/kg, 0.0725 mg/kg, 0.075 mg/kg, 0.0775 mg/kg, 0.08 mg/kg, 0.0825 mg/kg, 0.085 mg/kg, 0.0875 mg/kg, 0.09 mg/kg, 0.0925 mg/kg, 0.095 mg/kg, 0.0975 mg/kg, 0.1 mg/kg, 0.125 mg/kg, 0.15 mg/kg, 0.175 mg/kg, 0.2 mg/kg, 0.225 mg/kg, 0.25 mg/kg, 0.275 mg/kg, 0.3 mg/kg, 0.325 mg/kg, 0.35 mg/kg, 0.375 mg/kg, 0.4 mg/kg, 0.425 mg/kg, 0.45 mg/kg, 0.475 mg/kg, or about 0.5 mg/kg. Values intermediate to the foregoing recited values are also intended to be part of this invention.

[0438] The pharmaceutical composition can be administered once daily, or the iRNA can be administered as two, three, or more sub-doses at appropriate intervals throughout the day or even using continuous infusion or delivery through a controlled release formulation. In that case, the iRNA contained in each sub-dose must be correspondingly smaller in order to achieve the total daily dosage. The dosage unit can also be compounded for delivery over several days, e.g., using a conventional sustained release formulation which provides sustained release of the iRNA over a several day period. Sustained release formulations are well known in the art and are particularly useful for delivery of agents at a particular site, such as could be used with the agents of the present invention. In this embodiment, the dosage unit contains a corresponding multiple of the daily dose.

[0439] In other embodiments, a single dose of the pharmaceutical compositions can be long lasting, such that subsequent doses are administered at not more than 3, 4, or 5 day intervals, or at not more than 1, 2, 3, or 4 week intervals. In some embodiments of the invention, a single dose of the pharmaceutical compositions of the invention is administered once per week. In other embodiments of the invention, a single dose of the pharmaceutical compositions of the invention is administered bi-monthly.

[0440] The skilled artisan will appreciate that certain factors can influence the dosage and timing required to effectively treat a subject, including but not limited to the severity of the disease or disorder, previous treatments, the general health and/or age of the subject, and other diseases present. Moreover, treatment of a subject with a therapeutically effective amount of a composition can include a single treatment or a series of treatments. Estimates of effective dosages and in vivo half-lives for the individual iRNAs encompassed by the invention can be made using conventional methodologies or on the basis of in vivo testing using an appropriate animal model, as described elsewhere herein.

[0441] Advances in mouse genetics have generated a number of mouse models for the study of various human diseases, such as a disorder associated with iron overload that would benefit from reduction in the expression of TMPRSS6. Such models can be used for in vivo testing of iRNA, as well as for determining a therapeutically effective dose. Suitable mouse models are known in the art and include, for example, the thalassemic Th3/+ mouse as a model of β-thalassemia (Douct et al., Am. J. Pathol. (2011), 178(2):774-83), the HFE knockout mouse as a model of hereditary hemochromatosis (Zhou et al. (1998) Proc. Natl. Acad. Sci USA, 85:2492-2497); a Uros(mut248) mouse as a model of congenital erythropoictic porphyria (Ged et al. (2006) Genomics, 87(1):84-92).

[0442] The pharmaceutical compositions of the present invention can be administered in a number of ways depending upon whether local or systemic treatment is desired and upon the area to be treated. Administration can be topical (e.g., by a transdermal patch), pulmonary, e.g., by inhalation or insufflation of powders or aerosols, including by nebulizer; intratracheal, intranasal, epidermal and transdermal, oral or parenteral. Parenteral administration includes intravenous, intraarterial, subcutaneous, intraperitoneal or intramuscular injection or infusion; subdermal, e.g., via an implanted device; or intracranial, e.g., by intraparenchymal, intrathecal or intraventricular, administration

[0443] The iRNA can be delivered in a manner to target a particular tissue, such as the liver (e.g., the hepatocytes of the liver).

[0444] Pharmaceutical compositions and formulations for topical administration can include transdermal patches, ointments, lotions, creams, gels, drops, suppositories, sprays, liquids and powders. Conventional pharmaceutical carriers, aqueous, powder or oily bases, thickeners and the like can be necessary or desirable. Coated condoms, gloves and the like can also be useful. Suitable topical formulations include those in which the iRNAs featured in the invention are in admixture with a topical delivery agent such as lipids, liposomes, fatty acids, fatty acid esters, steroids, chelating agents and surfactants. Suitable lipids and liposomes include neutral (e.g., diolcoylphosphatidyl DOPE ethanolamine, dimyristoylphosphatidyl choline DMPC, distcarolyphosphatidyl choline) negative (e.g., dimyristoylphosphatidyl glycerol DMPG) and cationic (e.g., diolcoyltetramethylaminopropyl DOTAP and diolcoylphosphatidyl ethanolamine DOTMA). iRNAs featured in the invention can be encapsulated within liposomes or can form complexes thereto, in particular to cationic liposomes. Alternatively, iRNAs can be complexed to lipids, in particular to cationic lipids. Suitable fatty acids and esters include but are not limited to arachidonic acid, oleic acid, eicosanoic acid, lauric acid, caprylic acid, capric acid, myristic acid, palmitic acid, stearic acid, linoleic acid, linolenic acid, dicaprate, tricaprate, monoolein, dilaurin, glyceryl 1-monocaprate, 1-dodecylazacycloheptan-2-one, an acylcarnitine, an acylcholine, or a C₁₋₂₀ alkyl ester (e.g., isopropylmyristate IPM), monoglyceride, diglyceride or pharmaceutically acceptable salt thereof). Topical formulations are described in detail in U.S. Pat. No. 6,747,014, which is incorporated herein by reference.

A. iRNA Formulations Comprising Membranous Molecular Assemblies

[0445] An iRNA for use in the compositions and methods of the invention can be formulated for delivery in a membranous molecular assembly, e.g., a liposome or a micelle. As used herein, the term “liposome” refers to a vesicle composed of amphiphilic lipids arranged in at least one bilayer, e.g., one bilayer or a plurality of bilayers. Liposomes include unilamellar and multilamellar vesicles that have a membrane formed from a lipophilic material and an aqueous interior. The aqueous portion contains the iRNA composition. The lipophilic material isolates the aqueous interior from an aqueous exterior, which typically does not include the iRNA composition, although in some examples, it may. Liposomes are useful for the transfer and delivery of active ingredients to the site of action. Because the liposomal membrane is structurally similar to biological membranes, when liposomes are applied to a tissue, the liposomal bilayer fuses with bilayer of the cellular membranes. As the merging of the liposome and cell progresses, the internal aqueous contents that include the iRNA are delivered into the cell where the iRNA can specifically bind to a target RNA and can mediate RNAi. In some cases the liposomes are also specifically targeted, e.g., to direct the iRNA to particular cell types.

[0446] A liposome containing a RNAi agent can be prepared by a variety of methods. In one example, the lipid component of a liposome is dissolved in a detergent so that micelles are formed with the lipid component. For example, the lipid component can be an amphipathic cationic lipid or lipid conjugate. The detergent can have a high critical micelle concentration and may be nonionic. Exemplary detergents include cholate, CHAPS, octylglucoside, deoxycholate, and lauroyl sarcosine. The RNAi agent preparation is then added to the micelles that include the lipid component. The cationic groups on the lipid interact with the RNAi agent and condense around the RNAi agent to form a liposome. After condensation, the detergent is removed, e.g., by dialysis, to yield a liposomal preparation of RNAi agent.

[0447] If necessary a carrier compound that assists in condensation can be added during the condensation reaction, e.g., by controlled addition. For example, the carrier compound can be a polymer other than a nucleic acid (e.g., spermine or spermidine). pH can also adjusted to favor condensation.

[0448] Methods for producing stable polynucleotide delivery vehicles, which incorporate a polynucleotide/cationic lipid complex as structural components of the delivery vehicle, are further described in, e.g., WO 96/37194, the entire contents of which are incorporated herein by reference. Liposome formation can also include one or more aspects of exemplary methods described in Felgner, P. L. et al., Proc. Natl. Acad. Sci., USA 8:7413-7417, 1987; U.S. Pat. Nos. 4,897,355; 5,171,678; Bangham, et al. M. Mol. Biol. 23:238, 1965; Olson, et al. Biochim. Biophys. Acta 557:9, 1979; Szoka, et al. Proc. Natl. Acad. Sci. 75: 4194, 1978; Mayhew, et al. Biochim. Biophys. Acta 775:169, 1984; Kim, et al. Biochim. Biophys. Acta 728:339, 1983; and Fukunaga, et al. Endocrinol. 115:757, 1984. Commonly used techniques for preparing lipid aggregates of appropriate size for use as delivery vehicles include sonication and freeze-thaw plus extrusion (see, e.g., Mayer, et al. Biochim. Biophys. Acta 858:161, 1986). Microfluidization can be used when consistently small (50 to 200 nm) and relatively uniform aggregates are desired (Mayhew, et al. Biochim. Biophys. Acta 775:169, 1984). These methods are readily adapted to packaging RNAi agent preparations into liposomes.

[0449] Liposomes fall into two broad classes. Cationic liposomes are positively charged liposomes which interact with the negatively charged nucleic acid molecules to form a stable complex. The positively charged nucleic acid/liposome complex binds to the negatively charged cell surface and is internalized in an endosome. Due to the acidic pH within the endosome, the liposomes are ruptured, releasing their contents into the cell cytoplasm (Wang et al., Biochem. Biophys. Res. Commun., 1987, 147, 980-985).

[0450] Liposomes which are pH-sensitive or negatively-charged, entrap nucleic acids rather than complex with it. Since both the nucleic acid and the lipid are similarly charged, repulsion rather than complex formation occurs. Nevertheless, some nucleic acid is entrapped within the aqueous interior of these liposomes. pH-sensitive liposomes have been used to deliver nucleic acids encoding the thymidine kinase gene to cell monolayers in culture. Expression of the exogenous gene was detected in the target cells (Zhou et al., Journal of Controlled Release, 1992, 19, 269-274).

[0451] One major type of liposomal composition includes phospholipids other than naturally-derived phosphatidylcholine. Neutral liposome compositions, for example, can be formed from dimyristoyl phosphatidylcholine (DMPC) or dipalmitoyl phosphatidylcholine (DPPC). Anionic liposome compositions generally are formed from dimyristoyl phosphatidylglycerol, while anionic fusogenic liposomes are formed primarily from diolcoyl phosphatidylethanolamine (DOPE). Another type of liposomal composition is formed from phosphatidylcholine (PC) such as, for example, soybean PC, and egg PC. Another type is formed from mixtures of phospholipid and/or phosphatidylcholine and/or cholesterol.

[0452] Examples of other methods to introduce liposomes into cells in vitro and in vivo include U.S. Pat. Nos. 5,283,185; 5,171,678; WO 94/00569; WO 93/24640; WO 91/16024; Felgner, J. Biol. Chem. 269:2550, 1994; Nabel, Proc. Natl. Acad. Sci. 90:11307, 1993; Nabel, Human Gene Ther. 3:649, 1992; Gershon, Biochem. 32:7143, 1993; and Strauss EMBO J. 11:417, 1992.

[0453] Non-ionic liposomal systems have also been examined to determine their utility in the delivery of drugs to the skin, in particular systems comprising non-ionic surfactant and cholesterol. Non-ionic liposomal formulations comprising Novasome™ I (glyceryl dilaurate/cholesterol/polyoxyethylene-10-stearyl ether) and Novasome™ II (glyceryl distearate/cholesterol/polyoxyethylene-10-stearyl ether) were used to deliver cyclosporin-A into the dermis of mouse skin. Results indicated that such non-ionic liposomal systems were effective in facilitating the deposition of cyclosporine A into different layers of the skin (Hu et al. S.T.P.Pharma. Sci., 1994, 4(6) 466).

[0454] Liposomes also include “sterically stabilized” liposomes, a term which, as used herein, refers to liposomes comprising one or more specialized lipids that, when incorporated into liposomes, result in enhanced circulation lifetimes relative to liposomes lacking such specialized lipids. Examples of sterically stabilized liposomes are those in which part of the vesicle-forming lipid portion of the liposome (A) comprises one or more glycolipids, such as monosialoganglioside G_{M1}, or (B) is derivatized with one or more hydrophilic polymers, such as a polyethylene glycol (PEG) moiety. While not wishing to be bound by any particular theory, it is thought in the art that, at least for sterically stabilized liposomes containing gangliosides, sphingomyelin, or PEG-derivatized lipids, the enhanced circulation half-life of these sterically stabilized liposomes derives from a reduced uptake into cells of the reticuloendothelial system (RES) (Allen et al., FEBS Letters, 1987, 223, 42; Wu et al., Cancer Research, 1993, 53, 3765).

[0455] Various liposomes comprising one or more glycolipids are known in the art. Papahadjopoulos et al. (Ann. N.Y. Acad. Sci., 1987, 507, 64) reported the ability of monosialoganglioside G_{M1}, galactocerebroside sulfate and phosphatidylinositol to improve blood half-lives of liposomes. These findings were expounded upon by Gabizon et al. (Proc. Natl. Acad. Sci. U.S.A., 1988, 85, 6949). U.S. Pat. No. 4,837,028 and WO 88/04924, both to Allen et al., disclose liposomes comprising (1) sphingomyelin and (2) the ganglioside G_{M1} or a galactocerebroside sulfate ester. U.S. Pat. No. 5,543,152 (Webb et al.) discloses liposomes comprising sphingomyelin. Liposomes comprising 1,2-sn-dimyristoylphosphatidylcholine are disclosed in WO 97/13499 (Lim et al).

[0456] In one embodiment, cationic liposomes are used. Cationic liposomes possess the advantage of being able to fuse to the cell membrane. Non-cationic liposomes, although not able to fuse as efficiently with the plasma membrane, are taken up by macrophages in vivo and can be used to deliver RNAi agents to macrophages.

[0457] Further advantages of liposomes include: liposomes obtained from natural phospholipids are biocompatible and biodegradable; liposomes can incorporate a wide range of water and lipid soluble drugs; liposomes can protect encapsulated RNAi agents in their internal compartments from metabolism and degradation (Rosoff, in “Pharmaceutical Dosage Forms,” Lieberman, Rieger and Banker (Eds.), 1988, volume 1, p. 245). Important considerations in the preparation of liposome formulations are the lipid surface charge, vesicle size and the aqueous volume of the liposomes.

[0458] A positively charged synthetic cationic lipid, N-[1-(2,3-dioleyloxy)propyl]-N,N,N-trimethylammonium chloride (DOTMA) can be used to form small liposomes that interact spontaneously with nucleic acid to form lipid-nucleic acid complexes which are capable of fusing with the negatively charged lipids of the cell membranes of tissue culture cells, resulting in delivery of RNAi agent (see, e.g., Felgner, P. L. et al., Proc. Natl. Acad. Sci., USA 8:7413-7417, 1987 and U.S. Pat. No. 4,897,355 for a description of DOTMA and its use with DNA).

[0459] A DOTMA analogue, 1,2-bis(oleoyloxy)-3-(trimethylammonia)propane (DOTAP) can be used in combination with a phospholipid to form DNA-complexing vesicles. Lipofectin™ Bethesda Research Laboratories, Gaithersburg, Md.) is an effective agent for the delivery of highly anionic nucleic acids into living tissue culture cells that comprise positively charged DOTMA liposomes which interact spontaneously with negatively charged polynucleotides to form complexes. When enough positively charged liposomes are used, the net charge on the resulting complexes is also positive. Positively charged complexes prepared in this way spontaneously attach to negatively charged cell surfaces, fuse with the plasma membrane, and efficiently deliver functional nucleic acids into, for example, tissue culture cells. Another commercially available cationic lipid, 1,2-bis(olcoyloxy)-3,3-(trimethylammonia)propane (“DOTAP”) (Bochringer Mannheim, Indianapolis, Indiana) differs from DOTMA in that the oleoyl moieties are linked by ester, rather than ether linkages.

[0460] Other reported cationic lipid compounds include those that have been conjugated to a variety of moieties including, for example, carboxyspermine which has been conjugated to one of two types of lipids and includes compounds such as 5-carboxyspermylglycine dioctaoleoylamide (“DOGS”) (Transfectam™, Promega, Madison, Wisconsin) and dipalmitoylphosphatidylethanolamine 5-carboxyspermyl-amide (“DPPES”) (see, e.g., U.S. Pat. No. 5,171,678).

[0461] Another cationic lipid conjugate includes derivatization of the lipid with cholesterol (“DC-Chol”) which has been formulated into liposomes in combination with DOPE (See, Gao, X. and Huang, L., Biochim. Biophys. Res. Commun. 179:280, 1991). Lipopolylysine, made by conjugating polylysine to DOPE, has been reported to be effective for transfection in the presence of serum (Zhou, X. et al., Biochim. Biophys. Acta 1065:8, 1991). For certain cell lines, these liposomes containing conjugated cationic lipids, are said to exhibit lower toxicity and provide more efficient transfection than the DOTMA-containing compositions. Other commercially available cationic lipid products include DMRIE and DMRIE-HP (Vical, La Jolla, California) and Lipofectamine (DOSPA) (Life Technology, Inc., Gaithersburg, Maryland). Other cationic lipids suitable for the delivery of oligonucleotides are described in WO 98/39359 and WO 96/37194.

[0462] Liposomal formulations are particularly suited for topical administration, liposomes present several advantages over other formulations. Such advantages include reduced side effects related to high systemic absorption of the administered drug, increased accumulation of the administered drug at the desired target, and the ability to administer RNAi agent into the skin. In some implementations, liposomes are used for delivering RNAi agent to epidermal cells and also to enhance the penetration of RNAi agent into dermal tissues, e.g., into skin. For example, the liposomes can be applied topically. Topical delivery of drugs formulated as liposomes to the skin has been documented (see, e.g., Weiner et al., Journal of Drug Targeting, 1992, vol. 2,405-410 and du Plessis et al., Antiviral Research, 18, 1992, 259-265; Mannino, R. J. and Fould-Fogerite, S., Biotechniques 6:682-690, 1988; Itani, T. et al. Gene 56:267-276. 1987; Nicolau, C. et al. Meth. Enz. 149:157-176, 1987; Straubinger, R. M. and Papahadjopoulos, D. Meth. Enz. 101:512-527, 1983; Wang, C. Y. and Huang, L., Proc. Natl. Acad. Sci. USA 84:7851-7855, 1987).

[0463] Non-ionic liposomal systems have also been examined to determine their utility in the delivery of drugs to the skin, in particular systems comprising non-ionic surfactant and cholesterol. Non-ionic liposomal formulations comprising Novasome I (glyceryl dilaurate/cholesterol/polyoxyethylene-10-stearyl ether) and Novasome II (glyceryl distearate/cholesterol/polyoxyethylene-10-stearyl ether) were used to deliver a drug into the dermis of mouse skin. Such formulations with RNAi agent are useful for treating a dermatological disorder.

[0464] Liposomes that include iRNA can be made highly deformable. Such deformability can enable the liposomes to penetrate through pore that are smaller than the average radius of the liposome. For example, transfersomes are a type of deformable liposomes. Transferosomes can be made by adding surface edge activators, usually surfactants, to a standard liposomal composition. Transfersomes that include RNAi agent can be delivered, for example, subcutaneously by infection in order to deliver RNAi agent to keratinocytes in the skin. In order to cross intact mammalian skin, lipid vesicles must pass through a series of fine pores, each with a diameter less than 50 nm, under the influence of a suitable transdermal gradient. In addition, due to the lipid properties, these transferosomes can be self-optimizing (adaptive to the shape of pores, e.g., in the skin), self-repairing, and can frequently reach their targets without fragmenting, and often self-loading.

[0465] Other formulations amenable to the present invention are described in U.S. provisional application Ser. No. 61/018,616, filed Jan. 2, 2008; 61/018,611, filed Jan. 2, 2008; 61/039,748, filed Mar. 26, 2008; 61/047,087, filed Apr. 22, 2008 and 61/051,528, filed May 8, 2008. PCT application no PCT/US2007/080331, filed Oct. 3, 2007 also describes formulations that are amenable to the present invention.

[0466] Transfersomes are yet another type of liposomes, and are highly deformable lipid aggregates which are attractive candidates for drug delivery vehicles. Transfersomes can be described as lipid droplets which are so highly deformable that they are easily able to penetrate through pores which are smaller than the droplet. Transfersomes are adaptable to the environment in which they are used, e.g., they are self-optimizing (adaptive to the shape of pores in the skin), self-repairing, frequently reach their targets without fragmenting, and often self-loading. To make transfersomes it is possible to add surface edge-activators, usually surfactants, to a standard liposomal composition. Transfersomes have been used to deliver serum albumin to the skin. The transfersome-mediated delivery of serum albumin has been shown to be as effective as subcutaneous injection of a solution containing serum albumin.

[0467] Surfactants find wide application in formulations such as emulsions (including microemulsions) and liposomes. The most common way of classifying and ranking the properties of the many different types of surfactants, both natural and synthetic, is by the use of the hydrophile/lipophile balance (HLB). The nature of the hydrophilic group (also known as the “head”) provides the most useful means for categorizing the different surfactants used in formulations (Rieger, in Pharmaceutical Dosage Forms, Marcel Dekker, Inc., New York, N. Y., 1988, p. 285).

[0468] If the surfactant molecule is not ionized, it is classified as a nonionic surfactant. Nonionic surfactants find wide application in pharmaceutical and cosmetic products and are usable over a wide range of pH values. In general their HLB values range from 2 to about 18 depending on their structure. Nonionic surfactants include nonionic esters such as ethylene glycol esters, propylene glycol esters, glyceryl esters, polyglyceryl esters, sorbitan esters, sucrose esters, and ethoxylated esters. Nonionic alkanolamides and ethers such as fatty alcohol ethoxylates, propoxylated alcohols, and ethoxylated/propoxylated block polymers are also included in this class. The polyoxyethylene surfactants are the most popular members of the nonionic surfactant class.

[0469] If the surfactant molecule carries a negative charge when it is dissolved or dispersed in water, the surfactant is classified as anionic. Anionic surfactants include carboxylates such as soaps, acyl lactylates, acyl amides of amino acids, esters of sulfuric acid such as alkyl sulfates and ethoxylated alkyl sulfates, sulfonates such as alkyl benzene sulfonates, acyl isethionates, acyl taurates and sulfosuccinates, and phosphates. The most important members of the anionic surfactant class are the alkyl sulfates and the soaps.

[0470] If the surfactant molecule carries a positive charge when it is dissolved or dispersed in water, the surfactant is classified as cationic. Cationic surfactants include quaternary ammonium salts and ethoxylated amines. The quaternary ammonium salts are the most used members of this class.

[0471] If the surfactant molecule has the ability to carry either a positive or negative charge, the surfactant is classified as amphoteric. Amphoteric surfactants include acrylic acid derivatives, substituted alkylamides, N-alkylbetaines and phosphatides.

[0472] The use of surfactants in drug products, formulations and in emulsions has been reviewed (Rieger, in Pharmaceutical Dosage Forms, Marcel Dekker, Inc., New York, N.Y., 1988, p. 285).

[0473] The iRNA for use in the methods of the invention can also be provided as micellar formulations. “Micelles” are defined herein as a particular type of molecular assembly in which amphipathic molecules are arranged in a spherical structure such that all the hydrophobic portions of the molecules are directed inward, leaving the hydrophilic portions in contact with the surrounding aqueous phase. The converse arrangement exists if the environment is hydrophobic.

[0474] A mixed micellar formulation suitable for delivery through transdermal membranes may be prepared by mixing an aqueous solution of the siRNA composition, an alkali metal C₈ to C₂₂ alkyl sulphate, and a micelle forming compounds. Exemplary micelle forming compounds include lecithin, hyaluronic acid, pharmaceutically acceptable salts of hyaluronic acid, glycolic acid, lactic acid, chamomile extract, cucumber extract, oleic acid, linoleic acid, linolenic acid, monoolein, monoolcates, monolaurates, borage oil, evening of primrose oil, menthol, trihydroxy oxo cholanyl glycine and pharmaceutically acceptable salts thereof, glycerin, polyglycerin, lysine, polylysine, triolein, polyoxyethylene ethers and analogues thereof, polidocanol alkyl ethers and analogues thereof, chenodeoxycholate, deoxycholate, and mixtures thereof. The micelle forming compounds may be added at the same time or after addition of the alkali metal alkyl sulphate. Mixed micelles will form with substantially any kind of mixing of the ingredients but vigorous mixing in order to provide smaller size micelles.

[0475] In one method a first micellar composition is prepared which contains the siRNA composition and at least the alkali metal alkyl sulphate. The first micellar composition is then mixed with at least three micelle forming compounds to form a mixed micellar composition. In another method, the micellar composition is prepared by mixing the siRNA composition, the alkali metal alkyl sulphate and at least one of the micelle forming compounds, followed by addition of the remaining micelle forming compounds, with vigorous mixing.

[0476] Phenol and/or m-cresol may be added to the mixed micellar composition to stabilize the formulation and protect against bacterial growth. Alternatively, phenol and/or m-cresol may be added with the micelle forming ingredients. An isotonic agent such as glycerin may also be added after formation of the mixed micellar composition.

[0477] For delivery of the micellar formulation as a spray, the formulation can be put into an aerosol dispenser and the dispenser is charged with a propellant. The propellant, which is under pressure, is in liquid form in the dispenser. The ratios of the ingredients are adjusted so that the aqueous and propellant phases become one, i.e., there is one phase. If there are two phases, it is necessary to shake the dispenser prior to dispensing a portion of the contents, e.g., through a metered valve. The dispensed dose of pharmaceutical agent is propelled from the metered valve in a fine spray.

[0478] Propellants may include hydrogen-containing chlorofluorocarbons, hydrogen-containing fluorocarbons, dimethyl ether and diethyl ether. In certain embodiments, HFA 134a (1,1,1,2 tetrafluoroethane) may be used.

[0479] The specific concentrations of the essential ingredients can be determined by relatively straightforward experimentation. For absorption through the oral cavities, it is often desirable to increase, e.g., at least double or triple, the dosage for through injection or administration through the gastrointestinal tract.

### B. Lipid Particles

[0480] iRNAs, e.g., dsRNAs of in the invention may be fully encapsulated in a lipid formulation, e.g., a LNP, or other nucleic acid-lipid particle.

[0481] As used herein, the term “LNP” refers to a stable nucleic acid-lipid particle. LNPs contain a cationic lipid, a non-cationic lipid, and a lipid that prevents aggregation of the particle (e.g., a PEG-lipid conjugate). LNPs are extremely useful for systemic applications, as they exhibit extended circulation lifetimes following intravenous (i.v.) injection and accumulate at distal sites (e.g., sites physically separated from the administration site). LNPs include “pSPLP,” which include an encapsulated condensing agent-nucleic acid complex as set forth in PCT Publication No. WO 00/03683. The particles of the present invention typically have a mean diameter of about 50 nm to about 150 nm, more typically about 60 nm to about 130 nm, more typically about 70 nm to about 110 nm, most typically about 70 nm to about 90 nm, and are substantially nontoxic. In addition, the nucleic acids when present in the nucleic acid-lipid particles of the present invention are resistant in aqueous solution to degradation with a nuclease. Nucleic acid-lipid particles and their method of preparation are disclosed in, e.g., U.S. Pat. Nos. 5,976,567; 5,981,501; 6,534,484; 6,586,410; 6,815,432; U.S. Publication No. 2010/0324120 and PCT Publication No. WO 96/40964.

[0482] In one embodiment, the lipid to drug ratio (mass/mass ratio) (e.g., lipid to dsRNA ratio) will be in the range of from about 1:1 to about 50:1, from about 1:1 to about 25:1, from about 3:1 to about 15:1, from about 4:1 to about 10:1, from about 5:1 to about 9:1, or about 6:1 to about 9:1. Ranges intermediate to the above recited ranges are also contemplated to be part of the invention.

[0483] The cationic lipid can be, for example, N,N-dioleyl-N,N-dimethylammonium chloride (DODAC), N,N-distearyl-N,N-dimethylammonium bromide (DDAB), N-(I-(2,3-diolcoyloxy)propyl)-N,N,N-trimethylammonium chloride (DOTAP), N-(I-(2,3-dioleyloxy)propyl)-N,N,N-trimethylammonium chloride (DOTMA), N,N-dimethyl-2,3-dioleyloxy)propylamine (DODMA), 1,2-DiLinoleyloxy-N,N-dimethylaminopropane (DLinDMA), 1,2-Dilinolenyloxy-N,N-dimethylaminopropane (DLenDMA), 1,2-Dilinoleylcarbamoyloxy-3-dimethylaminopropane (DLin-C-DAP), 1,2-Dilinoleyoxy-3-(dimethylamino)acetoxypropane (DLin-DAC), 1,2-Dilinoleyoxy-3-morpholinopropane (DLin-MA), 1,2-Dilinoleoyl-3-dimethylaminopropane (DLinDAP), 1,2-Dilinolcylthio-3-dimethylaminopropane (DLin-S-DMA), 1-Linolcoyl-2-linoleyloxy-3-dimethylaminopropane (DLin-2-DMAP), 1,2-Dilinoleyloxy-3-trimethylaminopropane chloride salt (DLin-TMA.Cl), 1,2-Dilinoleoyl-3-trimethylaminopropane chloride salt (DLin-TAP.Cl), 1,2-Dilinoleyloxy-3-(N-methylpiperazino)propane (DLin-MPZ), or 3-(N,N-Dilinoleylamino)-1,2-propanediol (DLinAP), 3-(N,N-Dioleylamino)-1,2-propanedio (DOAP), 1,2-Dilinoleyloxo-3-(2-N,N-dimethylamino)ethoxypropane (DLin-EG-DMA), 1,2-Dilinolenyloxy-N,N-dimethylaminopropane (DLinDMA), 2,2-Dilinoleyl-4-dimethylaminomethyl-[1,3]-dioxolane (DLin-K-DMA) or analogs thereof, (3aR,5s,6aS)-N,N-dimethyl-2,2-di((9Z,12Z)-octadeca-9,12-dienyl)tetrahydro-3aH-cyclopenta[d][1,3]dioxol-5-amine (ALN100), (6Z,9Z,28Z,31Z)-heptatriaconta-6,9,28,31-tetraen-19-yl 4-(dimethylamino)butanoate (MC3), 1,1′-(2-(4-(2-((2-(bis(2-hydroxydodecyl)amino)ethyl)(2-hydroxydodecyl)amino)ethyl)piperazin-1-yl)ethylazanediyl)didodecan-2-ol (Tech G1), or a mixture thereof. The cationic lipid can comprise from about 20 mol % to about 50 mol % or about 40 mol % of the total lipid present in the particle.

[0484] In another embodiment, the compound 2,2-Dilinoleyl-4-dimethylaminoethyl-[1,3]-dioxolane can be used to prepare lipid-siRNA nanoparticles. Synthesis of 2,2-Dilinoleyl-4-dimethylaminoethyl-[1,3]-dioxolane is described in U.S. provisional patent application No. 61/107,998 filed on Oct. 23, 2008, which is herein incorporated by reference. In one embodiment, the lipid-siRNA particle includes 40%2, 2-Dilinolcyl-4-dimethylaminoethyl-[1,3]-dioxolane: 10% DSPC: 40% Cholesterol: 10% PEG-C-DOMG (mole percent) with a particle size of 63.0±20 nm and a 0.027 siRNA/Lipid Ratio.

[0485] The ionizable/non-cationic lipid can be an anionic lipid or a neutral lipid including, but not limited to, distearoylphosphatidylcholine (DSPC), dioleoylphosphatidylcholine (DOPC), dipalmitoylphosphatidylcholine (DPPC), diolcoylphosphatidylglycerol (DOPG), dipalmitoylphosphatidylglycerol (DPPG), diolcoyl-phosphatidylethanolamine (DOPE), palmitoyloleoylphosphatidylcholine (POPC), palmitoylolcoylphosphatidylethanolamine (POPE), diolcoyl-phosphatidylethanolamine 4-(N-maleimidomethyl)-cyclohexane-1-carboxylate (DOPE-mal), dipalmitoyl phosphatidyl ethanolamine (DPPE), dimyristoylphosphoethanolamine (DMPE), distearoyl-phosphatidyl-ethanolamine (DSPE), 16-O-monomethyl PE, 16-O-dimethyl PE, 18-1-trans PE, 1-stearoyl-2-oleoyl-phosphatidyethanolamine (SOPE), cholesterol, or a mixture thereof. The non-cationic lipid can be from about 5 mol % to about 90 mol %, about 10 mol %, or about 58 mol % if cholesterol is included, of the total lipid present in the particle.

[0486] The conjugated lipid that inhibits aggregation of particles can be, for example, a polyethyleneglycol (PEG)-lipid including, without limitation, a PEG-diacylglycerol (DAG), a PEG-dialkyloxypropyl (DAA), a PEG-phospholipid, a PEG-ceramide (Cer), or a mixture thereof. The PEG-DAA conjugate can be, for example, a PEG-dilauryloxypropyl (Ci₂), a PEG-dimyristyloxypropyl (Ci₄), a PEG-dipalmityloxypropyl (Ci₆), or a PEG-distearyloxypropyl (C]₈). The conjugated lipid that prevents aggregation of particles can be from 0 mol % to about 20 mol % or about 2 mol % of the total lipid present in the particle.

[0487] In some embodiments, the nucleic acid-lipid particle further includes cholesterol at, e.g., about 10 mol % to about 60 mol % or about 48 mol % of the total lipid present in the particle.

[0488] In one embodiment, the lipidoid ND98·4HCl (MW 1487) (see U.S. patent application Ser. No. 12/056,230, filed Mar. 26, 2008, which is incorporated herein by reference), Cholesterol (Sigma-Aldrich), and PEG-Ceramide C16 (Avanti Polar Lipids) can be used to prepare lipid-dsRNA nanoparticles (i.e., LNP01 particles). Stock solutions of each in ethanol can be prepared as follows: ND98, 133 mg/ml; Cholesterol, 25 mg/ml, PEG-Ceramide C16, 100 mg/ml. The ND98, Cholesterol, and PEG-Ceramide C16 stock solutions can then be combined in a, e.g., 42:48:10 molar ratio. The combined lipid solution can be mixed with aqueous dsRNA (e.g., in sodium acetate pH 5) such that the final ethanol concentration is about 35-45% and the final sodium acetate concentration is about 100-300 mM. Lipid-dsRNA nanoparticles typically form spontaneously upon mixing. Depending on the desired particle size distribution, the resultant nanoparticle mixture can be extruded through a polycarbonate membrane (e.g., 100 nm cut-off) using, for example, a thermobarrel extruder, such as Lipex Extruder (Northern Lipids, Inc). In some cases, the extrusion step can be omitted. Ethanol removal and simultaneous buffer exchange can be accomplished by, for example, dialysis or tangential flow filtration. Buffer can be exchanged with, for example, phosphate buffered saline (PBS) at about pH 7, e.g., about pH 6.9, about pH 7.0, about pH 7.1, about pH 7.2, about pH 7.3, or about pH 7.4.

[chemical structure]

[0489] LNP01 formulations are described, e.g., in International Application Publication No. WO 2008/042973, which is hereby incorporated by reference.

[0490] Additional exemplary lipid-dsRNA formulations are described in Table A.

TABLE A

| | | cationic lipid/non-cationic |
|---|---|---|
| | | lipid/cholesterol/PEG-lipid conjugate |
| | Ionizable/Cationic Lipid | Lipid:siRNA ratio |
| LNP-1 | 1,2-Dilinolenyloxy-N,N-dimethylaminopropane | DLinDMA/DPPC/Cholesterol/PEG-cDMA |
| | (DLinDMA) | (57.1/7.1/34.4/1.4) |
| | | lipid:siRNA ~7:1 |
| 2-XTC | 2,2-Dilinoleyl-4-dimethylaminoethyl-[1,3]- | XTC/DPPC/Cholesterol/PEG-cDMA |
| | dioxolane (XTC) | 57.1/7.1/34.4/1.4 |
| | | lipid:siRNA ~7:1 |
| LNP05 | 2,2-Dilinoleyl-4-dimethylaminoethyl-[1,3]- | XTC/DSPC/Cholesterol/PEG-DMG |
| | dioxolane (XTC) | 57.5/7.5/31.5/3.5 |
| | | lipid:siRNA ~6:1 |
| LNP06 | 2,2-Dilinoleyl-4-dimethylaminoethyl-[1,3]- | XTC/DSPC/Cholesterol/PEG-DMG |
| | dioxolane (XTC) | 57.5/7.5/31.5/3.5 |
| | | lipid:siRNA ~11:1 |
| LNP07 | 2,2-Dilinoleyl-4-dimethylaminoethyl-[1,3]- | XTC/DSPC/Cholesterol/PEG-DMG |
| | dioxolane (XTC) | 60/7.5/31/1.5, |
| | | lipid:siRNA ~6:1 |
| LNP08 | 2,2-Dilinoleyl-4-dimethylaminoethyl-[1,3]- | XTC/DSPC/Cholesterol/PEG-DMG |
| | dioxolane (XTC) | 60/7.5/31/1.5, |
| | | lipid:siRNA ~11:1 |
| LNP09 | 2,2-Dilinoleyl-4-dimethylaminoethyl-[1,3]- | XTC/DSPC/Cholesterol/PEG-DMG |
| | dioxolane (XTC) | 50/10/38.5/1.5 |
| | | Lipid:siRNA 10:1 |
| LNP10 | (3aR,5s,6aS)-N,N-dimethyl-2,2-di((9Z,12Z)- | ALN100/DSPC/Cholesterol/PEG-DMG |
| | octadeca-9,12-dienyl)tetrahydro-3aH- | 50/10/38.5/1.5 |
| | cyclopenta[d][1,3]dioxol-5-amine (ALN100) | Lipid:siRNA 10:1 |
| LNP11 | (6Z,9Z,28Z,31Z)-heptatriaconta-6,9,28,31- | MC-3/DSPC/Cholesterol/PEG-DMG |
| | tetraen-19-yl 4-(dimethylamino)butanoate | 50/10/38.5/1.5 |
| | (MC3) | Lipid:siRNA 10:1 |
| LNP12 | 1,1′-(2-(4-(2-((2-(bis(2- | Tech G1/DSPC/Cholesterol/PEG-DMG |
| | hydroxydodecyl)amino)ethyl)(2- | 50/10/38.5/1.5 |
| | hydroxydodecyl)amino)ethyl)piperazin-1- | Lipid:siRNA 10:1 |
| | yl)ethylazanediyl)didodecan-2-ol (Tech G1) | |
| LNP13 | XTC | XTC/DSPC/Chol/PEG-DMG |
| | | 50/10/38.5/1.5 |
| | | Lipid:siRNA: 33:1 |
| LNP14 | MC3 | MC3/DSPC/Chol/PEG-DMG |
| | | 40/15/40/5 |
| | | Lipid:siRNA: 11:1 |
| LNP15 | MC3 | MC3/DSPC/Chol/PEG-DSG/GalNAc-PEG-DSG |
| | | 50/10/35/4.5/0.5 |
| | | Lipid:siRNA: 11:1 |
| LNP16 | MC3 | MC3/DSPC/Chol/PEG-DMG |
| | | 50/10/38.5/1.5 |
| | | Lipid:siRNA: 7:1 |
| LNP17 | MC3 | MC3/DSPC/Chol/PEG-DSG |
| | | 50/10/38.5/1.5 |
| | | Lipid:siRNA: 10:1 |
| LNP18 | MC3 | MC3/DSPC/Chol/PEG-DMG |
| | | 50/10/38.5/1.5 |
| | | Lipid:siRNA: 12:1 |
| LNP19 | MC3 | MC3/DSPC/Chol/PEG-DMG |
| | | 50/10/35/5 |
| | | Lipid:siRNA: 8:1 |
| LNP20 | MC3 | MC3/DSPC/Chol/PEG-DPG |
| | | 50/10/38.5/1.5 |
| | | Lipid:siRNA: 10:1 |
| LNP21 | C12-200 | C12-200/DSPC/Chol/PEG-DSG |
| | | 50/10/38.5/1.5 |
| | | Lipid:siRNA: 7:1 |
| LNP22 | XTC | XTC/DSPC/Chol/PEG-DSG |
| | | 50/10/38.5/1.5 |
| | | Lipid:siRNA: 10:1 |

DSPC: distearoylphosphatidylcholine
DPPC: dipalmitoylphosphatidylcholine
PEG-DMG: PEG-didimyristoyl glycerol (C14-PEG, or PEG-C14) (PEG with avg mol wt of 2000)
PEG-DSG: PEG-distyryl glycerol (C18-PEG, or PEG-C18) (PEG with avg mol wt of 2000)
PEG-cDMA: PEG-carbamoyl-1,2-dimyristyloxypropylamine (PEG with avg mol wt of 2000)
LNP (1,2-Dilinolenyloxy-N,N-dimethylaminopropane (DLinDMA)) comprising formulations are described in International Publication No. WO2009/127060, filed Apr. 15, 2009, which is hereby incorporated by reference.
XTC comprising formulations are described, e.g., in U.S. Provisional Ser. No. 61/148,366, filed Jan. 29, 2009; U.S. Provisional Ser. No. 61/156,851, filed Mar. 2, 2009; U.S. Provisional Ser. No. filed Jun. 10, 2009; U.S. Provisional Ser. No. 61/228,373, filed Jul. 24, 2009; U.S. Provisional Ser. No. 61/239,686, filed Sep. 3, 2009, and International Application No. PCT/US2010/022614, filed Jan. 29, 2010, which are hereby incorporated by reference.
MC3 comprising formulations are described, e.g., in U.S. Publication No. 2010/0324120, filed Jun. 10, 2010, the entire contents of which are hereby incorporated by reference. ALNY-100 comprising formulations are described, e.g., International patent application number PCT/US09/63933, filed on Nov. 10, 2009, which is hereby incorporated by reference. C12-200 comprising formulations are described in U.S. Provisional Ser. No. 61/175,770, filed May 5, 2009 and International Application No. PCT/US10/33777, filed May 5, 2010, which are hereby incorporated by reference.

### Synthesis of Ionizable/Cationic Lipids

[0491] Any of the compounds, e.g., cationic lipids and the like, used in the nucleic acid-lipid particles of the invention can be prepared by known organic synthesis techniques, including the methods described in more detail in the Examples. All substituents are as defined below unless indicated otherwise.

[0492] “Alkyl” means a straight chain or branched, noncyclic or cyclic, saturated aliphatic hydrocarbon containing from 1 to 24 carbon atoms. Representative saturated straight chain alkyls include methyl, ethyl, n-propyl, n-butyl, n-pentyl, n-hexyl, and the like; while saturated branched alkyls include isopropyl, sec-butyl, isobutyl, tert-butyl, isopentyl, and the like. Representative saturated cyclic alkyls include cyclopropyl, cyclobutyl, cyclopentyl, cyclohexyl, and the like; while unsaturated cyclic alkyls include cyclopentenyl and cyclohexenyl, and the like.

[0493] “Alkenyl” means an alkyl, as defined above, containing at least one double bond between adjacent carbon atoms. Alkenyls include both cis and trans isomers. Representative straight chain and branched alkenyls include ethylenyl, propylenyl, 1-butenyl, 2-butenyl, isobutylenyl, 1-pentenyl, 2-pentenyl, 3-methyl-1-butenyl, 2-methyl-2-butenyl, 2,3-dimethyl-2-butenyl, and the like.

[0494] “Alkynyl” means any alkyl or alkenyl, as defined above, which additionally contains at least one triple bond between adjacent carbons. Representative straight chain and branched alkynyls include acetylenyl, propynyl, 1-butynyl, 2-butynyl, 1-pentynyl, 2-pentynyl, 3-methyl-1 butynyl, and the like.

[0495] “Acyl” means any alkyl, alkenyl, or alkynyl wherein the carbon at the point of attachment is substituted with an oxo group, as defined below. For example, —C(═O)alkyl, —C(═O)alkenyl, and —C(═O)alkynyl are acyl groups.

[0496] “Heterocycle” means a 5- to 7-membered monocyclic, or 7- to 10-membered bicyclic, heterocyclic ring which is either saturated, unsaturated, or aromatic, and which contains from 1 or 2 heteroatoms independently selected from nitrogen, oxygen and sulfur, and wherein the nitrogen and sulfur heteroatoms can be optionally oxidized, and the nitrogen heteroatom can be optionally quaternized, including bicyclic rings in which any of the above heterocycles are fused to a benzene ring. The heterocycle can be attached via any heteroatom or carbon atom. Heterocycles include heteroaryls as defined below. Heterocycles include morpholinyl, pyrrolidinonyl, pyrrolidinyl, piperidinyl, piperizynyl, hydantoinyl, valerolactamyl, oxiranyl, oxetanyl, tetrahydrofuranyl, tetrahydropyranyl, tetrahydropyridinyl, tetrahydroprimidinyl, tetrahydrothiophenyl, tetrahydrothiopyranyl, tetrahydropyrimidinyl, tetrahydrothiophenyl, tetrahydrothiopyranyl, and the like.

[0497] The terms “optionally substituted alkyl”, “optionally substituted alkenyl”, “optionally substituted alkynyl”, “optionally substituted acyl”, and “optionally substituted heterocycle” means that, when substituted, at least one hydrogen atom is replaced with a substituent. In the case of an oxo substituent (═O) two hydrogen atoms are replaced. In this regard, substituents include oxo, halogen, heterocycle, —CN, —ORx, —NRxRy, —NRxC(═O)Ry, —NRxSO2Ry, —C(═O)Rx, —C(═O)ORx, —C(═O)NRxRy, —SOnRx and —SOnNRxRy, wherein n is 0, 1 or 2, Rx and Ry are the same or different and independently hydrogen, alkyl or heterocycle, and each of said alkyl and heterocycle substituents can be further substituted with one or more of oxo, halogen, —OH, —CN, alkyl, —ORx, heterocycle, —NRxRy, —NRxC(═O)Ry, —NRxSO2Ry, —C(═O)Rx, —C(═O)ORx, —C(═O)NRxRy, —SOnRx and —SOnNRxRy. “Halogen” means fluoro, chloro, bromo and iodo.

[0498] In some embodiments, the methods of the invention can require the use of protecting groups. Protecting group methodology is well known to those skilled in the art (see, for example, Protective Groups in Organic Synthesis, Green, T. W. et al., Wiley-Interscience, New York City, 1999). Briefly, protecting groups within the context of this invention are any group that reduces or eliminates unwanted reactivity of a functional group. A protecting group can be added to a functional group to mask its reactivity during certain reactions and then removed to reveal the original functional group. In some embodiments an “alcohol protecting group” is used. An “alcohol protecting group” is any group which decreases or eliminates unwanted reactivity of an alcohol functional group. Protecting groups can be added and removed using techniques well known in the art.

### Synthesis of Formula A

[0499] In some embodiments, nucleic acid-lipid particles of the invention are formulated using a cationic lipid of formula A:

[chemical structure]

where R1 and R2 are independently alkyl, alkenyl or alkynyl, each can be optionally substituted, and R3 and R4 are independently lower alkyl or R3 and R4 can be taken together to form an optionally substituted heterocyclic ring. In some embodiments, the cationic lipid is XTC (2,2-Dilinoleyl-4-dimethylaminoethyl-[1,3]-dioxolane). In general, the lipid of formula A above can be made by the following Reaction Schemes 1 or 2, wherein all substituents are as defined above unless indicated otherwise.

[chemical structure]

[0500] Lipid A, where R1 and R2 are independently alkyl, alkenyl or alkynyl, each can be optionally substituted, and R3 and R4 are independently lower alkyl or R3 and R4 can be taken together to form an optionally substituted heterocyclic ring, can be prepared according to Scheme 1. Ketone 1 and bromide 2 can be purchased or prepared according to methods known to those of ordinary skill in the art. Reaction of 1 and 2 yields ketal 3. Treatment of ketal 3 with amine 4 yields lipids of formula A. The lipids of formula A can be converted to the corresponding ammonium salt with an organic salt of formula 5, where X is anion counter ion selected from halogen, hydroxide, phosphate, sulfate, or the like.

[chemical structure]

[0501] Alternatively, the ketone 1 starting material can be prepared according to Scheme 2. Grignard reagent 6 and cyanide 7 can be purchased or prepared according to methods known to those of ordinary skill in the art. Reaction of 6 and 7 yields ketone 1. Conversion of ketone 1 to the corresponding lipids of formula A is as described in Scheme 1.

### Synthesis of MC3

[0502] Preparation of DLin-M-C3-DMA (i.e., (6Z,9Z,28Z,31Z)-heptatriaconta-6,9,28,31-tetraen-19-yl 4-(dimethylamino)butanoate) was as follows. A solution of (6Z,9Z,28Z,31Z)-heptatriaconta-6,9,28,31-tetraen-19-ol (0.53 g), 4-N,N-dimethylaminobutyric acid hydrochloride (0.51 g), 4-N,N-dimethylaminopyridine (0.61 g) and 1-ethyl-3-(3-dimethylaminopropyl)carbodiimide hydrochloride (0.53 g) in dichloromethane (5 mL) was stirred at room temperature overnight. The solution was washed with dilute hydrochloric acid followed by dilute aqueous sodium bicarbonate. The organic fractions were dried over anhydrous magnesium sulphate, filtered and the solvent removed on a rotovap. The residue was passed down a silica gel column (20 g) using a 1-5% methanol/dichloromethane elution gradient. Fractions containing the purified product were combined and the solvent removed, yielding a colorless oil (0.54 g).

### Synthesis of ALNY-100

[0503] Synthesis of ketal 519 [ALNY-100] was performed using the following scheme 3:

[chemical structure]

### Synthesis of 515

[0504] To a stirred suspension of LiAlH4 (3.74 g, 0.09852 mol) in 200 ml anhydrous THF in a two neck RBF (1 L), was added a solution of 514 (10 g, 0.04926 mol) in 70 mL of THF slowly at 0° C. under nitrogen atmosphere. After complete addition, reaction mixture was warmed to room temperature and then heated to reflux for 4 h. Progress of the reaction was monitored by TLC. After completion of reaction (by TLC) the mixture was cooled to 0 0 C and quenched with careful addition of saturated Nₐ2SO4 solution. Reaction mixture was stirred for 4 h at room temperature and filtered off. Residue was washed well with THF. The filtrate and washings were mixed and diluted with 400 mL dioxane and 26 mL conc. HCl and stirred for 20 minutes at room temperature. The volatilities were stripped off under vacuum to furnish the hydrochloride salt of 515 as a white solid. Yield: 7.12 g 1H-NMR (DMSO, 400 MHZ): 8=9.34 (broad, 2H), 5.68 (s, 2H), 3.74 (m, 1H), 2.66-2.60 (m, 2H), 2.50-2.45 (m, 5H).

### Synthesis of 516

[0505] To a stirred solution of compound 515 in 100 mL dry DCM in a 250 mL two neck RBF, was added NEt3 (37.2 mL, 0.2669 mol) and cooled to 0 0 C under nitrogen atmosphere. After a slow addition of N-(benzyloxy-carbonyloxy)-succinimide (20 g, 0.08007 mol) in 50 mL dry DCM, reaction mixture was allowed to warm to room temperature. After completion of the reaction (2-3 h by TLC) mixture was washed successively with 1N HCl solution (1×100 mL) and saturated NaHCO₃ solution (1×50 mL). The organic layer was then dried over anhyd. Nₐ2SO4 and the solvent was evaporated to give crude material which was purified by silica gel column chromatography to get 516 as sticky mass. Yield: 11 g (89%). 1H-NMR (CDCl3, 400 MHz): δ=7.36-7.27 (m, 5H), 5.69 (s, 2H), 5.12 (s, 2H), 4.96 (br., 1H) 2.74 (s, 3H), 2.60 (m, 2H), 2.30-2.25 (m, 2H). LC-MS [M+H]−232.3 (96.94%).

### Synthesis of 517A and 517B

[0506] The cyclopentene 516 (5 g, 0.02164 mol) was dissolved in a solution of 220 mL acetone and water (10:1) in a single neck 500 mL RBF and to it was added N-methyl morpholine-N-oxide (7.6 g, 0.06492 mol) followed by 4.2 mL of 7.6% solution of OsO4 (0.275 g, 0.00108 mol) in tert-butanol at room temperature. After completion of the reaction (˜3 h), the mixture was quenched with addition of solid Nₐ2SO3 and resulting mixture was stirred for 1.5 h at room temperature. Reaction mixture was diluted with DCM (300 mL) and washed with water (2×100 mL) followed by saturated NaHCO₃(1×50 mL) solution, water (1×30 mL) and finally with brine (1×50 mL). Organic phase was dried over an Nₐ2SO4 and solvent was removed in vacuum. Silica gel column chromatographic purification of the crude material was afforded a mixture of diasteromers, which were separated by prep HPLC. Yield: −6 g crude 517A-Peak-1 (white solid), 5.13 g (96%). 1H-NMR (DMSO, 400 MHZ): δ=7.39-7.31 (m, 5H), 5.04 (s, 2H), 4.78-4.73 (m, 1H), 4.48-4.47 (d, 2H), 3.94-3.93 (m, 2H), 2.71 (s, 3H), 1.72-1.67 (m, 4H). LC-MS—[M+H]−266.3, [M+NH4+]−283.5 present, HPLC-97.86%. Stereochemistry confirmed by X-ray.

### Synthesis of 518

[0507] Using a procedure analogous to that described for the synthesis of compound 505, compound 518 (1.2 g, 41%) was obtained as a colorless oil. 1H-NMR (CDCl3, 400 MHZ): δ=7.35-7.33 (m, 4H), 7.30-7.27 (m, 1H), 5.37-5.27 (m, 8H), 5.12 (s, 2H), 4.75 (m, 1H), 4.58-4.57 (m, 2H), 2.78-2.74 (m, 7H), 2.06-2.00 (m, 8H), 1.96-1.91 (m, 2H), 1.62 (m, 4H), 1.48 (m, 2H), 1.37-1.25 (br m, 36H), 0.87 (m, 6H). HPLC-98.65%.

### General Procedure for the Synthesis of Compound 519

[0508] A solution of compound 518 (1 eq) in hexane (15 mL) was added in a drop-wise fashion to an ice-cold solution of LAH in THF (1 M, 2 eq). After complete addition, the mixture was heated at 40° C. over 0.5 h then cooled again on an ice bath. The mixture was carefully hydrolyzed with saturated aqueous Nₐ2SO4 then filtered through celite and reduced to an oil. Column chromatography provided the pure 519 (1.3 g, 68%) which was obtained as a colorless oil. 13C NMR δ=130.2, 130.1 (x2), 127.9 (x3), 112.3, 79.3, 64.4, 44.7, 38.3, 35.4, 31.5, 29.9 (x2), 29.7, 29.6 (x2), 29.5 (x3), 29.3 (x2), 27.2 (×3), 25.6, 24.5, 23.3, 226, 14.1; Electrospray MS (+ve): Molecular weight for C44H80NO2 (M+H)+ Calc. 654.6, Found 654.6.

[0509] Formulations prepared by either the standard or extrusion-free method can be characterized in similar manners. For example, formulations are typically characterized by visual inspection. They should be whitish translucent solutions free from aggregates or sediment. Particle size and particle size distribution of lipid-nanoparticles can be measured by light scattering using, for example, a Malvern Zetasizer Nano ZS (Malvern, USA). Particles should be about 20-300 nm, such as 40-100 nm in size. The particle size distribution should be unimodal. The total dsRNA concentration in the formulation, as well as the entrapped fraction, is estimated using a dye exclusion assay. A sample of the formulated dsRNA can be incubated with an RNA-binding dye, such as Ribogreen (Molecular Probes) in the presence or absence of a formulation disrupting surfactant, e.g., 0.5% Triton-X100. The total dsRNA in the formulation can be determined by the signal from the sample containing the surfactant, relative to a standard curve. The entrapped fraction is determined by subtracting the “free” dsRNA content (as measured by the signal in the absence of surfactant) from the total dsRNA content. Percent entrapped dsRNA is typically >85%. For LNP formulation, the particle size is at least 30 nm, at least 40 nm, at least 50 nm, at least 60 nm, at least 70 nm, at least 80 nm, at least 90 nm, at least 100 nm, at least 110 nm, and at least 120 nm. The suitable range is typically about at least 50 nm to about at least 110 nm, about at least 60 nm to about at least 100 nm, or about at least 80 nm to about at least 90 nm.

[0510] Compositions and formulations for oral administration include powders or granules, microparticulates, nanoparticulates, suspensions or solutions in water or non-aqueous media, capsules, gel capsules, sachets, tablets or minitablets. Thickeners, flavoring agents, diluents, emulsifiers, dispersing aids or binders can be desirable. In some embodiments, oral formulations are those in which dsRNAs featured in the invention are administered in conjunction with one or more penetration enhancer surfactants and chelators. Suitable surfactants include fatty acids and/or esters or salts thereof, bile acids and/or salts thereof. Suitable bile acids/salts include chenodeoxycholic acid (CDCA) and ursodeoxychenodeoxycholic acid (UDCA), cholic acid, dehydrocholic acid, deoxycholic acid, glucholic acid, glycholic acid, glycodeoxycholic acid, taurocholic acid, taurodeoxycholic acid, sodium tauro-24,25-dihydro-fusidate and sodium glycodihydrofusidate. Suitable fatty acids include arachidonic acid, undecanoic acid, oleic acid, lauric acid, caprylic acid, capric acid, myristic acid, palmitic acid, stearic acid, linoleic acid, linolenic acid, dicaprate, tricaprate, monoolein, dilaurin, glyceryl 1-monocaprate, 1-dodecylazacycloheptan-2-one, an acylcarnitine, an acylcholine, or a monoglyceride, a diglyceride or a pharmaceutically acceptable salt thereof (e.g., sodium). In some embodiments, combinations of penetration enhancers are used, for example, fatty acids/salts in combination with bile acids/salts. One exemplary combination is the sodium salt of lauric acid, capric acid and UDCA. Further penetration enhancers include polyoxyethylene-9-lauryl ether, polyoxyethylene-20-cetyl ether. DsRNAs featured in the invention can be delivered orally, in granular form including sprayed dried particles, or complexed to form micro or nanoparticles. DsRNA complexing agents include poly-amino acids; polyimines; polyacrylates; polyalkylacrylates, polyoxethanes, polyalkylcyanoacrylates; cationized gelatins, albumins, starches, acrylates, polyethyleneglycols (PEG) and starches; polyalkylcyanoacrylates; DEAE-derivatized polyimines, pollulans, celluloses and starches. Suitable complexing agents include chitosan, N-trimethylchitosan, poly-L-lysine, polyhistidine, polyornithine, polyspermines, protamine, polyvinylpyridine, polythiodiethylaminomethylethylene P(TDAE), polyaminostyrene (e.g., β-amino), poly(methylcyanoacrylate), poly(ethylcyanoacrylate), poly(butylcyanoacrylate), poly(isobutylcyanoacrylate), poly(isohexylcynaoacrylate), DEAE-methacrylate, DEAE-hexylacrylate, DEAE-acrylamide, DEAE-albumin and DEAE-dextran, polymethylacrylate, polyhexylacrylate, poly(D,L-lactic acid), poly(DL-lactic-co-glycolic acid (PLGA), alginate, and polyethyleneglycol (PEG). Oral formulations for dsRNAs and their preparation are described in detail in U.S. Pat. No. 6,887,906, US Publn. No. 20030027780, and U.S. Pat. No. 6,747,014, each of which is incorporated herein by reference.

[0511] Compositions and formulations for parenteral, intraparenchymal (into the brain), intrathecal, intraventricular or intrahepatic administration can include sterile aqueous solutions which can also contain buffers, diluents and other suitable additives such as, but not limited to, penetration enhancers, carrier compounds and other pharmaceutically acceptable carriers or excipients.

[0512] Pharmaceutical compositions of the present invention include, but are not limited to, solutions, emulsions, and liposome-containing formulations. These compositions can be generated from a variety of components that include, but are not limited to, preformed liquids, self-emulsifying solids and self-emulsifying semisolids. Particularly preferred are formulations that target the liver when treating hepatic disorders such as hepatic carcinoma.

[0513] The pharmaceutical formulations of the present invention, which can conveniently be presented in unit dosage form, can be prepared according to conventional techniques well known in the pharmaceutical industry. Such techniques include the step of bringing into association the active ingredients with the pharmaceutical carrier(s) or excipient(s). In general, the formulations are prepared by uniformly and intimately bringing into association the active ingredients with liquid carriers or finely divided solid carriers or both, and then, if necessary, shaping the product.

[0514] The compositions of the present invention can be formulated into any of many possible dosage forms such as, but not limited to, tablets, capsules, gel capsules, liquid syrups, soft gels, suppositories, and enemas. The compositions of the present invention can also be formulated as suspensions in aqueous, non-aqueous or mixed media. Aqueous suspensions can further contain substances which increase the viscosity of the suspension including, for example, sodium carboxymethylcellulose, sorbitol and/or dextran. The suspension can also contain stabilizers.

### C. Additional Formulations

[0515] i. Emulsions

[0516] The compositions of the present invention can be prepared and formulated as emulsions. Emulsions are typically heterogeneous systems of one liquid dispersed in another in the form of droplets usually exceeding 0.1 μm in diameter (see e.g., Ansel's Pharmaceutical Dosage Forms and Drug Delivery Systems, Allen, LV., Popovich N G., and Ansel H C., 2004, Lippincott Williams & Wilkins (8th ed.), New York, NY; Idson, in Pharmaceutical Dosage Forms, Lieberman, Rieger and Banker (Eds.), 1988 Marcel Dekker, Inc., New York, N.Y., volume 1, p. 199; Rosoff, in Pharmaceutical Dosage Forms, Lieberman, Rieger and Banker (Eds.), 1988 Marcel Dekker, Inc., New York, N.Y., Volume 1, p. 245; Block in Pharmaceutical Dosage Forms, Lieberman, Rieger and Banker (Eds.), 1988 Marcel Dekker, Inc., New York, N. Y., volume 2, p. 335; Higuchi et al., in Remington's Pharmaceutical Sciences, Mack Publishing Co., Easton, Pa., 1985, p. 301). Emulsions are often biphasic systems comprising two immiscible liquid phases intimately mixed and dispersed with each other. In general, emulsions can be of either the water-in-oil (w/o) or the oil-in-water (o/w) variety. When an aqueous phase is finely divided into and dispersed as minute droplets into a bulk oily phase, the resulting composition is called a water-in-oil (w/o) emulsion. Alternatively, when an oily phase is finely divided into and dispersed as minute droplets into a bulk aqueous phase, the resulting composition is called an oil-in-water (o/w) emulsion. Emulsions can contain additional components in addition to the dispersed phases, and the active drug which can be present as a solution in either the aqueous phase, oily phase or itself as a separate phase. Pharmaceutical excipients such as emulsifiers, stabilizers, dyes, and anti-oxidants can also be present in emulsions as needed. Pharmaceutical emulsions can also be multiple emulsions that are comprised of more than two phases such as, for example, in the case of oil-in-water-in-oil (o/w/o) and water-in-oil-in-water (w/o/w) emulsions. Such complex formulations often provide certain advantages that simple binary emulsions do not. Multiple emulsions in which individual oil droplets of an o/w emulsion enclose small water droplets constitute a w/o/w emulsion. Likewise a system of oil droplets enclosed in globules of water stabilized in an oily continuous phase provides an o/w/o emulsion.

[0517] Emulsions are characterized by little or no thermodynamic stability. Often, the dispersed or discontinuous phase of the emulsion is well dispersed into the external or continuous phase and maintained in this form through the means of emulsifiers or the viscosity of the formulation. Either of the phases of the emulsion can be a semisolid or a solid, as is the case of emulsion-style ointment bases and creams. Other means of stabilizing emulsions entail the use of emulsifiers that can be incorporated into either phase of the emulsion. Emulsifiers can broadly be classified into four categories: synthetic surfactants, naturally occurring emulsifiers, absorption bases, and finely dispersed solids (see e.g., Ansel's Pharmaceutical Dosage Forms and Drug Delivery Systems, Allen, LV., Popovich N G., and Ansel H C., 2004, Lippincott Williams & Wilkins (8th cd.), New York, NY; Idson, in Pharmaceutical Dosage Forms, Lieberman, Rieger and Banker (Eds.), 1988 Marcel Dekker, Inc., New York, N.Y., volume 1, p. 199).

[0518] Synthetic surfactants, also known as surface active agents, have found wide applicability in the formulation of emulsions and have been reviewed in the literature (see e.g., Ansel's Pharmaceutical Dosage Forms and Drug Delivery Systems, Allen, LV., Popovich N G., and Ansel H C., 2004, Lippincott Williams & Wilkins (8th ed.), New York, NY; Rieger, in Pharmaceutical Dosage Forms, Lieberman, Rieger and Banker (Eds.), 1988 Marcel Dekker, Inc., New York, N.Y., volume 1, p. 285; Idson, in Pharmaceutical Dosage Forms, Lieberman, Rieger and Banker (Eds.), Marcel Dekker, Inc., New York, N.Y., 1988, volume 1, p. 199). Surfactants are typically amphiphilic and comprise a hydrophilic and a hydrophobic portion. The ratio of the hydrophilic to the hydrophobic nature of the surfactant has been termed the hydrophile/lipophile balance (HLB) and is a valuable tool in categorizing and selecting surfactants in the preparation of formulations. Surfactants can be classified into different classes based on the nature of the hydrophilic group: nonionic, anionic, cationic and amphoteric (see e.g., Ansel's Pharmaceutical Dosage Forms and Drug Delivery Systems, Allen, LV., Popovich N G., and Ansel H C., 2004, Lippincott Williams & Wilkins (8th ed.), New York, NY Rieger, in Pharmaceutical Dosage Forms, Lieberman, Rieger and Banker (Eds.), 1988 Marcel Dekker, Inc., New York, N.Y., volume 1, p. 285).

[0519] Naturally occurring emulsifiers used in emulsion formulations include lanolin, beeswax, phosphatides, lecithin and acacia. Absorption bases possess hydrophilic properties such that they can soak up water to form w/o emulsions yet retain their semisolid consistencies, such as anhydrous lanolin and hydrophilic petrolatum. Finely divided solids have also been used as good emulsifiers especially in combination with surfactants and in viscous preparations. These include polar inorganic solids, such as heavy metal hydroxides, nonswelling clays such as bentonite, attapulgite, hectorite, kaolin, montmorillonite, colloidal aluminum silicate and colloidal magnesium aluminum silicate, pigments and nonpolar solids such as carbon or glyceryl tristearate.

[0520] A large variety of non-emulsifying materials are also included in emulsion formulations and contribute to the properties of emulsions. These include fats, oils, waxes, fatty acids, fatty alcohols, fatty esters, humectants, hydrophilic colloids, preservatives and antioxidants (Block, in Pharmaceutical Dosage Forms, Lieberman, Rieger and Banker (Eds.), 1988 Marcel Dekker, Inc., New York, N.Y., volume 1, p. 335; Idson, in Pharmaceutical Dosage Forms, Lieberman, Rieger and Banker (Eds.), 1988 Marcel Dekker, Inc., New York, N.Y., volume 1, p. 199).

[0521] Hydrophilic colloids or hydrocolloids include naturally occurring gums and synthetic polymers such as polysaccharides (for example, acacia, agar, alginic acid, carrageenan, guar gum, karaya gum, and tragacanth), cellulose derivatives (for example, carboxymethylcellulose and carboxypropylcellulose), and synthetic polymers (for example, carbomers, cellulose ethers, and carboxyvinyl polymers). These disperse or swell in water to form colloidal solutions that stabilize emulsions by forming strong interfacial films around the dispersed-phase droplets and by increasing the viscosity of the external phase.

[0522] Since emulsions often contain a number of ingredients such as carbohydrates, proteins, sterols and phosphatides that can readily support the growth of microbes, these formulations often incorporate preservatives. Commonly used preservatives included in emulsion formulations include methyl paraben, propyl paraben, quaternary ammonium salts, benzalkonium chloride, esters of p-hydroxybenzoic acid, and boric acid. Antioxidants are also commonly added to emulsion formulations to prevent deterioration of the formulation. Antioxidants used can be free radical scavengers such as tocopherols, alkyl gallates, butylated hydroxyanisole, butylated hydroxytoluene, or reducing agents such as ascorbic acid and sodium metabisulfite, and antioxidant synergists such as citric acid, tartaric acid, and lecithin.

[0523] The application of emulsion formulations via dermatological, oral and parenteral routes and methods for their manufacture have been reviewed in the literature (see e.g., Ansel's Pharmaceutical Dosage Forms and Drug Delivery Systems, Allen, LV., Popovich N G., and Ansel H C., 2004, Lippincott Williams & Wilkins (8th ed.), New York, NY; Idson, in Pharmaceutical Dosage Forms, Lieberman, Rieger and Banker (Eds.), 1988 Marcel Dekker, Inc., New York, N.Y., volume 1, p. 199). Emulsion formulations for oral delivery have been very widely used because of case of formulation, as well as efficacy from an absorption and bioavailability standpoint (see e.g., Ansel's Pharmaceutical Dosage Forms and Drug Delivery Systems, Allen, LV., Popovich N G., and Ansel H C., 2004, Lippincott Williams & Wilkins (8th cd.), New York, NY; Rosoff, in Pharmaceutical Dosage Forms, Lieberman, Rieger and Banker (Eds.), 1988 Marcel Dekker, Inc., New York, N.Y., volume 1, p. 245; Idson, in Pharmaceutical Dosage Forms, Lieberman, Rieger and Banker (Eds.), 1988 Marcel Dekker, Inc., New York, N.Y., volume 1, p. 199). Mineral-oil base laxatives, oil-soluble vitamins and high fat nutritive preparations are among the materials that have commonly been administered orally as o/w emulsions.

ii. Microemulsions

[0524] In one embodiment of the present invention, the compositions of iRNAs and nucleic acids are formulated as microemulsions. A microemulsion can be defined as a system of water, oil and amphiphile which is a single optically isotropic and thermodynamically stable liquid solution (see e.g., Ansel's Pharmaceutical Dosage Forms and Drug Delivery Systems, Allen, LV., Popovich N G., and Ansel H C., 2004, Lippincott Williams & Wilkins (8th ed.), New York, NY; Rosoff, in Pharmaceutical Dosage Forms, Lieberman, Rieger and Banker (Eds.), 1988 Marcel Dekker, Inc., New York, N.Y., volume 1, p. 245). Typically microemulsions are systems that are prepared by first dispersing an oil in an aqueous surfactant solution and then adding a sufficient amount of a fourth component, generally an intermediate chain-length alcohol to form a transparent system. Therefore, microemulsions have also been described as thermodynamically stable, isotropically clear dispersions of two immiscible liquids that are stabilized by interfacial films of surface-active molecules (Leung and Shah, in: Controlled Release of Drugs: Polymers and Aggregate Systems, Rosoff, M., Ed., 1989, VCH Publishers, New York, pages 185-215). Microemulsions commonly are prepared via a combination of three to five components that include oil, water, surfactant, cosurfactant and electrolyte. Whether the microemulsion is of the water-in-oil (w/o) or an oil-in-water (o/w) type is dependent on the properties of the oil and surfactant used and on the structure and geometric packing of the polar heads and hydrocarbon tails of the surfactant molecules (Schott, in Remington's Pharmaceutical Sciences, Mack Publishing Co., Easton, Pa., 1985, p. 271).

[0525] The phenomenological approach utilizing phase diagrams has been extensively studied and has yielded a comprehensive knowledge, to one skilled in the art, of how to formulate microemulsions (see e.g., Ansel's Pharmaceutical Dosage Forms and Drug Delivery Systems, Allen, LV., Popovich N G., and Ansel H C., 2004, Lippincott Williams & Wilkins (8th ed.), New York, NY; Rosoff, in Pharmaceutical Dosage Forms, Lieberman, Rieger and Banker (Eds.), 1988 Marcel Dekker, Inc., New York, N.Y., volume 1, p. 245; Block, in Pharmaceutical Dosage Forms, Lieberman, Rieger and Banker (Eds.), 1988 Marcel Dekker, Inc., New York, N. Y., volume 1, p. 335). Compared to conventional emulsions, microemulsions offer the advantage of solubilizing water-insoluble drugs in a formulation of thermodynamically stable droplets that are formed spontaneously.

[0526] Surfactants used in the preparation of microemulsions include, but are not limited to, ionic surfactants, non-ionic surfactants, Brij 96, polyoxyethylene oleyl ethers, polyglycerol fatty acid esters, tetraglycerol monolaurate (ML310), tetraglycerol monooleate (MO310), hexaglycerol monooleate (PO310), hexaglycerol pentaoleate (PO500), decaglycerol monocaprate (MCA750), decaglycerol monooleate (MO750), decaglycerol sequioleate (SO750), decaglycerol decaoleate (DAO750), alone or in combination with cosurfactants. The cosurfactant, usually a short-chain alcohol such as ethanol, 1-propanol, and 1-butanol, serves to increase the interfacial fluidity by penetrating into the surfactant film and consequently creating a disordered film because of the void space generated among surfactant molecules. Microemulsions can, however, be prepared without the use of cosurfactants and alcohol-free self-emulsifying microemulsion systems are known in the art. The aqueous phase can typically be, but is not limited to, water, an aqueous solution of the drug, glycerol, PEG300, PEG400, polyglycerols, propylene glycols, and derivatives of ethylene glycol. The oil phase can include, but is not limited to, materials such as Captex 300, Captex 355, Capmul MCM, fatty acid esters, medium chain (C8-C12) mono, di, and tri-glycerides, polyoxyethylated glyceryl fatty acid esters, fatty alcohols, polyglycolized glycerides, saturated polyglycolized C8-C10 glycerides, vegetable oils and silicone oil.

[0527] Microemulsions are particularly of interest from the standpoint of drug solubilization and the enhanced absorption of drugs. Lipid based microemulsions (both o/w and w/o) have been proposed to enhance the oral bioavailability of drugs, including peptides (see e.g., U.S. Pat. Nos. 6,191,105; 7,063,860; 7,070,802; 7,157,099; Constantinides et al., Pharmaceutical Research, 1994, 11, 1385-1390; Ritschel, Meth. Find. Exp. Clin. Pharmacol., 1993, 13, 205). Microemulsions afford advantages of improved drug solubilization, protection of drug from enzymatic hydrolysis, possible enhancement of drug absorption due to surfactant-induced alterations in membrane fluidity and permeability, case of preparation, case of oral administration over solid dosage forms, improved clinical potency, and decreased toxicity (see e.g., U.S. Pat. Nos. 6,191,105; 7,063,860; 7,070,802; 7,157,099; Constantinides et al., Pharmaceutical Research, 1994, 11, 1385; Ho et al., J. Pharm. Sci., 1996, 85, 138-143). Often microemulsions can form spontaneously when their components are brought together at ambient temperature. This can be particularly advantageous when formulating thermolabile drugs, peptides or iRNAs. Microemulsions have also been effective in the transdermal delivery of active components in both cosmetic and pharmaceutical applications. It is expected that the microemulsion compositions and formulations of the present invention will facilitate the increased systemic absorption of iRNAs and nucleic acids from the gastrointestinal tract, as well as improve the local cellular uptake of iRNAs and nucleic acids.

[0528] Microemulsions of the present invention can also contain additional components and additives such as sorbitan monostearate (Grill 3), Labrasol, and penetration enhancers to improve the properties of the formulation and to enhance the absorption of the iRNAs and nucleic acids of the present invention. Penetration enhancers used in the microemulsions of the present invention can be classified as belonging to one of five broad categories—surfactants, fatty acids, bile salts, chelating agents, and non-chelating non-surfactants (Lee et al., Critical Reviews in Therapeutic Drug Carrier Systems, 1991, p. 92). Each of these classes has been discussed above.

iii. Microparticles

[0529] An RNAi agent of the invention may be incorporated into a particle, e.g., a microparticle. Microparticles can be produced by spray-drying, but may also be produced by other methods including lyophilization, evaporation, fluid bed drying, vacuum drying, or a combination of these techniques.

iv. Penetration Enhancers

[0530] In one embodiment, the present invention employs various penetration enhancers to effect the efficient delivery of nucleic acids, particularly iRNAs, to the skin of animals. Most drugs are present in solution in both ionized and nonionized forms. However, usually only lipid soluble or lipophilic drugs readily cross cell membranes. It has been discovered that even non-lipophilic drugs can cross cell membranes if the membrane to be crossed is treated with a penetration enhancer. In addition to aiding the diffusion of non-lipophilic drugs across cell membranes, penetration enhancers also enhance the permeability of lipophilic drugs.

[0531] Penetration enhancers can be classified as belonging to one of five broad categories, i.e., surfactants, fatty acids, bile salts, chelating agents, and non-chelating non-surfactants (see e.g., Malmsten, M. Surfactants and polymers in drug delivery, Informa Health Care, New York, NY, 2002; Lee et al., Critical Reviews in Therapeutic Drug Carrier Systems, 1991, p.92). Each of the above mentioned classes of penetration enhancers are described below in greater detail.

[0532] Surfactants (or “surface-active agents”) are chemical entities which, when dissolved in an aqueous solution, reduce the surface tension of the solution or the interfacial tension between the aqueous solution and another liquid, with the result that absorption of iRNAs through the mucosa is enhanced. In addition to bile salts and fatty acids, these penetration enhancers include, for example, sodium lauryl sulfate, polyoxyethylene-9-lauryl ether and polyoxyethylene-20-cetyl ether) (see e.g., Malmsten, M. Surfactants and polymers in drug delivery, Informa Health Care, New York, NY, 2002; Lee et al., Critical Reviews in Therapeutic Drug Carrier Systems, 1991, p.92); and perfluorochemical emulsions, such as FC-43. Takahashi et al., J. Pharm. Pharmacol., 1988, 40, 252).

[0533] Various fatty acids and their derivatives which act as penetration enhancers include, for example, oleic acid, lauric acid, capric acid (n-decanoic acid), myristic acid, palmitic acid, stearic acid, linoleic acid, linolenic acid, dicaprate, tricaprate, monoolein (1-monooleoyl-rac-glycerol), dilaurin, caprylic acid, arachidonic acid, glycerol 1-monocaprate, 1-dodecylazacycloheptan-2-one, acylcarnitines, acylcholines, C₁₋₂₀ alkyl esters thereof (e.g., methyl, isopropyl and t-butyl), and mono- and di-glycerides thereof (i.e., oleate, laurate, caprate, myristate, palmitate, stearate, linoleate, etc.) (see e.g., Touitou, E., et al. Enhancement in Drug Delivery, CRC Press, Danvers, M A, 2006; Lee et al., Critical Reviews in Therapeutic Drug Carrier Systems, 1991, p.92; Muranishi, Critical Reviews in Therapeutic Drug Carrier Systems, 1990, 7, 1-33; El Hariri et al., J. Pharm. Pharmacol., 1992, 44, 651-654).

[0534] The physiological role of bile includes the facilitation of dispersion and absorption of lipids and fat-soluble vitamins (see e.g., Malmsten, M. Surfactants and polymers in drug delivery, Informa Health Care, New York, NY, 2002; Brunton, Chapter 38 in: Goodman & Gilman's The Pharmacological Basis of Therapeutics, 9th Ed., Hardman et al. Eds., McGraw-Hill, New York, 1996, pp. 934-935). Various natural bile salts, and their synthetic derivatives, act as penetration enhancers. Thus the term “bile salts” includes any of the naturally occurring components of bile as well as any of their synthetic derivatives. Suitable bile salts include, for example, cholic acid (or its pharmaceutically acceptable sodium salt, sodium cholate), dehydrocholic acid (sodium dehydrocholate), deoxycholic acid (sodium deoxycholate), glucholic acid (sodium glucholate), glycholic acid (sodium glycocholate), glycodeoxycholic acid (sodium glycodeoxycholate), taurocholic acid (sodium taurocholate), taurodeoxycholic acid (sodium taurodeoxycholate), chenodeoxycholic acid (sodium chenodeoxycholate), ursodeoxycholic acid (UDCA), sodium tauro-24,25-dihydro-fusidate (STDHF), sodium glycodihydrofusidate and polyoxyethylene-9-lauryl ether (POE) (see e.g., Malmsten, M. Surfactants and polymers in drug delivery, Informa Health Care, New York, NY, 2002; Lee et al., Critical Reviews in Therapeutic Drug Carrier Systems, 1991, page 92; Swinyard, Chapter 39 In: Remington's Pharmaceutical Sciences, 18th Ed., Gennaro, cd., Mack Publishing Co., Easton, Pa., 1990, pages 782-783; Muranishi, Critical Reviews in Therapeutic Drug Carrier Systems, 1990, 7, 1-33; Yamamoto et al., J. Pharm. Exp. Ther., 1992, 263, 25; Yamashita et al., J. Pharm. Sci., 1990, 79, 579-583).

[0535] Chelating agents, as used in connection with the present invention, can be defined as compounds that remove metallic ions from solution by forming complexes therewith, with the result that absorption of iRNAs through the mucosa is enhanced. With regards to their use as penetration enhancers in the present invention, chelating agents have the added advantage of also serving as DNase inhibitors, as most characterized DNA nucleases require a divalent metal ion for catalysis and are thus inhibited by chelating agents (Jarrett, J. Chromatogr., 1993, 618, 315-339). Suitable chelating agents include but are not limited to disodium ethylenediaminetetraacetate (EDTA), citric acid, salicylates (e.g., sodium salicylate, 5-methoxysalicylate and homovanilate), N-acyl derivatives of collagen, laureth-9 and N-amino acyl derivatives of beta-diketones (enamines)(see e.g., Katdare, A. et al., Excipient development for pharmaceutical, biotechnology, and drug delivery, CRC Press, Danvers, M A, 2006; Lee et al., Critical Reviews in Therapeutic Drug Carrier Systems, 1991, page 92; Muranishi, Critical Reviews in Therapeutic Drug Carrier Systems, 1990, 7, 1-33; Buur et al., J. Control Rel., 1990, 14, 43-51).

[0536] As used herein, non-chelating non-surfactant penetration enhancing compounds can be defined as compounds that demonstrate insignificant activity as chelating agents or as surfactants but that nonetheless enhance absorption of iRNAs through the alimentary mucosa (see e.g., Muranishi, Critical Reviews in Therapeutic Drug Carrier Systems, 1990, 7, 1-33). This class of penetration enhancers includes, for example, unsaturated cyclic ureas, 1-alkyl- and 1-alkenylazacyclo-alkanone derivatives (Lee et al., Critical Reviews in Therapeutic Drug Carrier Systems, 1991, page 92); and non-steroidal anti-inflammatory agents such as diclofenac sodium, indomethacin and phenylbutazone (Yamashita et al., J. Pharm. Pharmacol., 1987, 39, 621-626).

[0537] Agents that enhance uptake of iRNAs at the cellular level can also be added to the pharmaceutical and other compositions of the present invention. For example, cationic lipids, such as lipofectin (Junichi et al, U.S. Pat. No. 5,705,188), cationic glycerol derivatives, and polycationic molecules, such as polylysine (Lollo et al., PCT Application WO 97/30731), are also known to enhance the cellular uptake of dsRNAs. Examples of commercially available transfection reagents include, for example Lipofectamine™ (Invitrogen; Carlsbad, CA), Lipofectamine 2000™ (Invitrogen; Carlsbad, CA), 293Fectin™ (Invitrogen; Carlsbad, CA), Cellfectin™ (Invitrogen; Carlsbad, CA), DMRIE-C™ (Invitrogen; Carlsbad, CA), FreeStyle™ MAX (Invitrogen; Carlsbad, CA), Lipofectamine™ 2000 CD (Invitrogen; Carlsbad, CA), Lipofectamine™ (Invitrogen; Carlsbad, CA), RNAiMAX (Invitrogen; Carlsbad, CA), Oligofectamine™ (Invitrogen; Carlsbad, CA), Optifect™ (Invitrogen; Carlsbad, CA), X-tremeGENE Q2 Transfection Reagent (Roche; Grenzacherstrasse, Switzerland), DOTAP Liposomal Transfection Reagent (Grenzacherstrasse, Switzerland), DOSPER Liposomal Transfection Reagent (Grenzacherstrasse, Switzerland), or Fugene (Grenzacherstrasse, Switzerland), Transfectam® Reagent (Promega; Madison, WI), TransFast™ Transfection Reagent (Promega; Madison, WI), Tfx™-20 Reagent (Promega; Madison, WI), Tfx™-50 Reagent (Promega; Madison, WI), DreamFect™ (OZ Biosciences; Marseille, France), EcoTransfect (OZ Biosciences; Marseille, France), TransPassa DI Transfection Reagent (New England Biolabs; Ipswich, MA, USA), LyoVec™/LipoGen™ (Invitrogen; San Diego, CA, USA), PerFectin Transfection Reagent (Genlantis; San Diego, CA, USA), NeuroPORTER Transfection Reagent (Genlantis; San Diego, CA, USA), GenePORTER Transfection reagent (Genlantis; San Diego, CA, USA), GencPORTER 2 Transfection reagent (Genlantis; San Diego, CA, USA), Cytofectin Transfection Reagent (Genlantis; San Diego, CA, USA), BaculoPORTER Transfection Reagent (Genlantis; San Diego, CA, USA), TroganPORTER™ transfection Reagent (Genlantis; San Diego, CA, USA), RiboFect (Bioline; Taunton, MA, USA), PlasFect (Bioline; Taunton, MA, USA), UniFECTOR (β-Bridge International; Mountain View, CA, USA), SurcFECTOR (β-Bridge International; Mountain View, CA, USA), or HiFect™ (β-Bridge International, Mountain View, CA, USA), among others.

[0538] Other agents can be utilized to enhance the penetration of the administered nucleic acids, including glycols such as ethylene glycol and propylene glycol, pyrrols such as 2-pyrrol, azones, and terpenes such as limonene and menthone.

v. Carriers

[0539] Certain compositions of the present invention also incorporate carrier compounds in the formulation. As used herein, “carrier compound” or “carrier” can refer to a nucleic acid, or analog thereof, which is inert (i.e., does not possess biological activity per se) but is recognized as a nucleic acid by in vivo processes that reduce the bioavailability of a nucleic acid having biological activity by, for example, degrading the biologically active nucleic acid or promoting its removal from circulation. The coadministration of a nucleic acid and a carrier compound, typically with an excess of the latter substance, can result in a substantial reduction of the amount of nucleic acid recovered in the liver, kidney or other extracirculatory reservoirs, presumably due to competition between the carrier compound and the nucleic acid for a common receptor. For example, the recovery of a partially phosphorothioate dsRNA in hepatic tissue can be reduced when it is coadministered with polyinosinic acid, dextran sulfate, polycytidic acid or 4-acetamido-4′isothiocyano-stilbene-2,2′-disulfonic acid (Miyao et al., DsRNA Res. Dev., 1995, 5, 115-121; Takakura et al., DsRNA & Nucl. Acid Drug Dev., 1996, 6, 177-183.

vi. Excipients

[0540] In contrast to a carrier compound, a “pharmaceutical carrier” or “excipient” is a pharmaceutically acceptable solvent, suspending agent or any other pharmacologically inert vehicle for delivering one or more nucleic acids to an animal. The excipient can be liquid or solid and is selected, with the planned manner of administration in mind, so as to provide for the desired bulk, consistency, etc., when combined with a nucleic acid and the other components of a given pharmaceutical composition. Typical pharmaceutical carriers include, but are not limited to, binding agents (e.g., pregelatinized maize starch, polyvinylpyrrolidone or hydroxypropyl methylcellulose, etc.); fillers (e.g., lactose and other sugars, microcrystalline cellulose, pectin, gelatin, calcium sulfate, ethyl cellulose, polyacrylates or calcium hydrogen phosphate, etc.); lubricants (e.g., magnesium stearate, talc, silica, colloidal silicon dioxide, stearic acid, metallic stearates, hydrogenated vegetable oils, corn starch, polyethylene glycols, sodium benzoate, sodium acetate, etc.); disintegrants (e.g., starch, sodium starch glycolate, etc.); and wetting agents (e.g., sodium lauryl sulphate, etc).

[0541] Pharmaceutically acceptable organic or inorganic excipients suitable for non-parenteral administration which do not deleteriously react with nucleic acids can also be used to formulate the compositions of the present invention. Suitable pharmaceutically acceptable carriers include, but are not limited to, water, salt solutions, alcohols, polyethylene glycols, gelatin, lactose, amylose, magnesium stearate, talc, silicic acid, viscous paraffin, hydroxymethylcellulose, polyvinylpyrrolidone and the like.

[0542] Formulations for topical administration of nucleic acids can include sterile and non-sterile aqueous solutions, non-aqueous solutions in common solvents such as alcohols, or solutions of the nucleic acids in liquid or solid oil bases. The solutions can also contain buffers, diluents and other suitable additives. Pharmaceutically acceptable organic or inorganic excipients suitable for non-parenteral administration which do not deleteriously react with nucleic acids can be used.

[0543] Suitable pharmaceutically acceptable excipients include, but are not limited to, water, salt solutions, alcohol, polyethylene glycols, gelatin, lactose, amylose, magnesium stearate, talc, silicic acid, viscous paraffin, hydroxymethylcellulose, polyvinylpyrrolidone and the like.

vii. Other Components

[0544] The compositions of the present invention can additionally contain other adjunct components conventionally found in pharmaceutical compositions, at their art-established usage levels. Thus, for example, the compositions can contain additional, compatible, pharmaceutically-active materials such as, for example, antipruritics, astringents, local anesthetics or anti-inflammatory agents, or can contain additional materials useful in physically formulating various dosage forms of the compositions of the present invention, such as dyes, flavoring agents, preservatives, antioxidants, opacifiers, thickening agents and stabilizers. However, such materials, when added, should not unduly interfere with the biological activities of the components of the compositions of the present invention. The formulations can be sterilized and, if desired, mixed with auxiliary agents, e.g., lubricants, preservatives, stabilizers, wetting agents, emulsifiers, salts for influencing osmotic pressure, buffers, colorings, flavorings and/or aromatic substances and the like which do not deleteriously interact with the nucleic acid(s) of the formulation.

[0545] Aqueous suspensions can contain substances which increase the viscosity of the suspension including, for example, sodium carboxymethylcellulose, sorbitol and/or dextran. The suspension can also contain stabilizers.

[0546] In some embodiments, pharmaceutical compositions featured in the invention include (a) one or more iRNA compounds and (b) one or more agents which function by a non-RNAi mechanism and which are useful in treating a bleeding disorder. Examples of such agents include, but are not limited to an anti-inflammatory agent, anti-steatosis agent, anti-viral, and/or anti-fibrosis agent. In addition, other substances commonly used to protect the liver, such as silymarin, can also be used in conjunction with the iRNAs described herein. Other agents useful for treating liver diseases include telbivudine, entecavir, and protease inhibitors such as telaprevir and other disclosed, for example, in Tung et al., U.S. Application Publication Nos. 2005/0148548, 2004/0167116, and 2003/0144217; and in Hale et al., U.S. Application Publication No. 2004/0127488.

[0547] Toxicity and therapeutic efficacy of such compounds can be determined by standard pharmaceutical procedures in cell cultures or experimental animals, e.g., for determining the LD50 (the dose lethal to 50% of the population) and the ED50 (the dose therapeutically effective in 50% of the population). The dose ratio between toxic and therapeutic effects is the therapeutic index and it can be expressed as the ratio LD50/ED50. Compounds that exhibit high therapeutic indices are preferred.

[0548] The data obtained from cell culture assays and animal studies can be used in formulating a range of dosage for use in humans. The dosage of compositions featured herein in the invention lies generally within a range of circulating concentrations that include the ED50 with little or no toxicity. The dosage can vary within this range depending upon the dosage form employed and the route of administration utilized. For any compound used in the methods featured in the invention, the therapeutically effective dose can be estimated initially from cell culture assays. A dose can be formulated in animal models to achieve a circulating plasma concentration range of the compound or, when appropriate, of the polypeptide product of a target sequence (e.g., achieving a decreased concentration of the polypeptide) that includes the IC50 (i.e., the concentration of the test compound which achieves a half-maximal inhibition of symptoms) as determined in cell culture. Such information can be used to more accurately determine useful doses in humans. Levels in plasma can be measured, for example, by high performance liquid chromatography.

[0549] In addition to their administration, as discussed above, the iRNAs featured in the invention can be administered in combination with other known agents effective in treatment of pathological processes that are mediated by iron overload and that can be treated by inhibiting TMPRSS6 expression. In any event, the administering physician can adjust the amount and timing of iRNA administration on the basis of results observed using standard measures of efficacy known in the art or described herein.

### V. Methods for Inhibiting TMPRSS6 Expression

[0550] The present invention provides methods of inhibiting expression of TMPRSS6 (matriptase-2) in a cell. The methods include contacting a cell with an RNAi agent, e.g., a double stranded RNAi agent, in an amount effective to inhibit expression of the TMPRSS6 in the cell, thereby inhibiting expression of the TMPRSS6 in the cell.

[0551] Contacting of a cell with a double stranded RNAi agent may be done in vitro or in vivo. Contacting a cell in vivo with the RNAi agent includes contacting a cell or group of cells within a subject, e.g., a human subject, with the RNAi agent. Combinations of in vitro and in vivo methods of contacting are also possible. Contacting may be direct or indirect, as discussed above. Furthermore, contacting a cell may be accomplished via a targeting ligand, including any ligand described herein or known in the art. In preferred embodiments, the targeting ligand is a carbohydrate moiety, e.g., a GalNAc3 ligand, or any other ligand that directs the RNAi agent to a site of interest, e.g., the liver of a subject.

[0552] The term “inhibiting,” as used herein, is used interchangeably with “reducing,” “silencing,” “downregulating” and other similar terms, and includes any level of inhibition.

[0553] The phrase “inhibiting expression of a TMPRSS6” is intended to refer to inhibition of expression of any TMPRSS6 gene (such as, e.g., a mouse TMPRSS6 gene, a rat TMPRSS6 gene, a monkey TMPRSS6 gene, or a human TMPRSS6 gene) as well as variants or mutants of a TMPRSS6 gene. Thus, the TMPRSS6 gene may be a wild-type TMPRSS6 gene, a mutant TMPRSS6 gene, or a transgenic TMPRSS6 gene in the context of a genetically manipulated cell, group of cells, or organism.

[0554] “Inhibiting expression of a TMPRSS6 gene” includes any level of inhibition of a TMPRSS6 gene, e.g., at least partial suppression of the expression of a TMPRSS6 gene. The expression of the TMPRSS6 gene may be assessed based on the level, or the change in the level, of any variable associated with TMPRSS6 gene expression, e.g., TMPRSS6 mRNA level, TMPRSS6 protein level, or lipid levels. This level may be assessed in an individual cell or in a group of cells, including, for example, a sample derived from a subject.

[0555] Inhibition may be assessed by a decrease in an absolute or relative level of one or more variables that are associated with TMPRSS6 expression compared with a control level. The control level may be any type of control level that is utilized in the art, e.g., a pre-dose baseline level, or a level determined from a similar subject, cell, or sample that is untreated or treated with a control (such as, e.g., buffer only control or inactive agent control).

[0556] In some embodiments of the methods of the invention, expression of a TMPRSS6 gene is inhibited by at least about 5%, at least about 10%, at least about 15%, at least about 20%, at least about 25%, at least about 30%, at least about 35%, at least about 40%, at least about 45%, at least about 50%, at least about 55%, at least about 60%, at least about 65%, at least about 70%, at least about 75%, at least about 80%, at least about 85%, at least about 90%, at least about 91%, at least about 92%, at least about 93%, at least about 94%, at least about 95%, at least about 96%, at least about 97%, at least about 98%, or at least about 99%.

[0557] Inhibition of the expression of a TMPRSS6 gene may be manifested by a reduction of the amount of mRNA expressed by a first cell or group of cells (such cells may be present, for example, in a sample derived from a subject) in which a TMPRSS6 gene is transcribed and which has or have been treated (e.g., by contacting the cell or cells with an RNAi agent of the invention, or by administering an RNAi agent of the invention to a subject in which the cells are or were present) such that the expression of a TMPRSS6 gene is inhibited, as compared to a second cell or group of cells substantially identical to the first cell or group of cells but which has not or have not been so treated (control cell(s)). In preferred embodiments, the inhibition is assessed by expressing the level of mRNA in treated cells as a percentage of the level of mRNA in control cells, using the following formula:

$$\frac{( m R N A in control cells ) - ( m R N A in treated cells )}{( m R N A in control cells )} \cdot 100 \%$$

[0558] Alternatively, inhibition of the expression of a TMPRSS6 gene may be assessed in terms of a reduction of a parameter that is functionally linked to TMPRSS6 gene expression, e.g., TMPRSS6 protein expression, hepcidin gene or protein expression, or iron levels in tissues or serum. TMPRSS6 gene silencing may be determined in any cell expressing TMPRSS6, either constitutively or by genomic engineering, and by any assay known in the art. The liver is the major site of TMPRSS6 expression. Other significant sites of expression include the kidneys and the uterus.

[0559] Inhibition of the expression of a TMPRSS6 protein may be manifested by a reduction in the level of the TMPRSS6 protein that is expressed by a cell or group of cells (e.g., the level of protein expressed in a sample derived from a subject). As explained above for the assessment of mRNA suppression, the inhibition of protein expression levels in a treated cell or group of cells may similarly be expressed as a percentage of the level of protein in a control cell or group of cells.

[0560] A control cell or group of cells that may be used to assess the inhibition of the expression of a TMPRSS6 gene includes a cell or group of cells that has not yet been contacted with an RNAi agent of the invention. For example, the control cell or group of cells may be derived from an individual subject (e.g., a human or animal subject) prior to treatment of the subject with an RNAi agent.

[0561] The level of TMPRSS6 mRNA that is expressed by a cell or group of cells may be determined using any method known in the art for assessing mRNA expression. In one embodiment, the level of expression of TMPRSS6 in a sample is determined by detecting a transcribed polynucleotide, or portion thereof, e.g., mRNA of the TMPRSS6 gene. RNA may be extracted from cells using RNA extraction techniques including, for example, using acid phenol/guanidine isothiocyanate extraction (RNAzol B; Biogenesis), RNeasy RNA preparation kits (Qiagen) or PAXgene (PreAnalytix, Switzerland). Typical assay formats utilizing ribonucleic acid hybridization include nuclear run-on assays, RT-PCR, RNase protection assays (Melton et al., Nuc. Acids Res. 12:7035), Northern blotting, in situ hybridization, and microarray analysis.

[0562] In one embodiment, the level of expression of TMPRSS6 is determined using a nucleic acid probe. The term “probe”, as used herein, refers to any molecule that is capable of selectively binding to a specific TMPRSS6. Probes can be synthesized by one of skill in the art, or derived from appropriate biological preparations. Probes may be specifically designed to be labeled. Examples of molecules that can be utilized as probes include, but are not limited to, RNA, DNA, proteins, antibodies, and organic molecules.

[0563] Isolated mRNA can be used in hybridization or amplification assays that include, but are not limited to, Southern or Northern analyses, polymerase chain reaction (PCR) analyses and probe arrays. One method for the determination of mRNA levels involves contacting the isolated mRNA with a nucleic acid molecule (probe) that can hybridize to TMPRSS6 mRNA. In one embodiment, the mRNA is immobilized on a solid surface and contacted with a probe, for example by running the isolated mRNA on an agarose gel and transferring the mRNA from the gel to a membrane, such as nitrocellulose. In an alternative embodiment, the probe(s) are immobilized on a solid surface and the mRNA is contacted with the probe(s), for example, in an

[0564] Affymetrix gene chip array. A skilled artisan can readily adapt known mRNA detection methods for use in determining the level of TMPRSS6 mRNA.

[0565] An alternative method for determining the level of expression of TMPRSS6 in a sample involves the process of nucleic acid amplification and/or reverse transcriptase (to prepare cDNA) of for example mRNA in the sample, e.g., by RT-PCR (the experimental embodiment set forth in Mullis, 1987, U.S. Pat. No. 4,683,202), ligase chain reaction (Barany (1991) Proc. Natl. Acad. Sci. USA 88:189-193), self sustained sequence replication (Guatelli et al. (1990) Proc. Natl. Acad. Sci. USA 87:1874-1878), transcriptional amplification system (Kwoh et al. (1989) Proc. Natl. Acad. Sci. USA 86:1173-1177), Q-Beta Replicase (Lizardi et al. (1988) Bio/Technology 6:1197), rolling circle replication (Lizardi et al., U.S. Pat. No. 5,854,033) or any other nucleic acid amplification method, followed by the detection of the amplified molecules using techniques well known to those of skill in the art. These detection schemes are especially useful for the detection of nucleic acid molecules if such molecules are present in very low numbers. In particular aspects of the invention, the level of expression of TMPRSS6 is determined by quantitative fluorogenic RT-PCR (i.e., the TaqMan™ System).

[0566] The expression levels of TMPRSS6 mRNA may be monitored using a membrane blot (such as used in hybridization analysis such as Northern, Southern, dot, and the like), or microwells, sample tubes, gels, beads or fibers (or any solid support comprising bound nucleic acids). See U.S. Pat. Nos. 5,770,722, 5,874,219, 5,744,305, 5,677,195 and 5,445,934, which are incorporated herein by reference. The determination of TMPRSS6 expression level may also comprise using nucleic acid probes in solution.

[0567] In preferred embodiments, the level of mRNA expression is assessed using branched DNA (bDNA) assays or real time PCR (qPCR). The use of these methods is described and exemplified in the Examples presented herein.

[0568] The level of TMPRSS6 protein expression may be determined using any method known in the art for the measurement of protein levels. Such methods include, for example, electrophoresis, capillary electrophoresis, high performance liquid chromatography (HPLC), thin layer chromatography (TLC), hyperdiffusion chromatography, fluid or gel precipitin reactions, absorption spectroscopy, a colorimetric assays, spectrophotometric assays, flow cytometry, immunodiffusion (single or double), immunoelectrophoresis, Western blotting, radioimmunoassay (RIA), enzyme-linked immunosorbent assays (ELISAs), immunofluorescent assays, electrochemiluminescence assays, and the like.

[0569] The term “sample” as used herein refers to a collection of similar fluids, cells, or tissues isolated from a subject, as well as fluids, cells, or tissues present within a subject. Examples of biological fluids include blood, scrum and serosal fluids, plasma, lymph, urine, cerebrospinal fluid, saliva, ocular fluids, and the like. Tissue samples may include samples from tissues, organs or localized regions. For example, samples may be derived from particular organs, parts of organs, or fluids or cells within those organs. In certain embodiments, samples may be derived from the liver (e.g., whole liver or certain segments of liver or certain types of cells in the liver, such as, e.g., hepatocytes). In preferred embodiments, a “sample derived from a subject” refers to blood or plasma drawn from the subject. In further embodiments, a “sample derived from a subject” refers to liver tissue derived from the subject.

[0570] In some embodiments of the methods of the invention, the RNAi agent is administered to a subject such that the RNAi agent is delivered to a specific site within the subject. The inhibition of expression of TMPRSS6 may be assessed using measurements of the level or change in the level of TMPRSS6 mRNA or TMPRSS6 protein in a sample derived from fluid or tissue from the specific site within the subject. In preferred embodiments, the site is the liver. The site may also be a subsection or subgroup of cells from any one of the aforementioned sites. The site may also include cells that express a particular type of receptor.

### VI. Methods for Treating or Preventing a TMPRSS6 Associated Disorder

[0571] The present invention also provides methods for treating or preventing diseases and conditions that can be modulated by TMPRSS6 gene expression. For example, the compositions described herein can be used to treat any disorder associated with iron overload, e.g., a thalassemia (e.g., β-thalassemia or α-thalassemia), primary hemochromatosis, secondary hemochromatosis, severe juvenile hemochromatosis, erythropoictic porphyria, sideroblastic anemia, hemolytic anemia, dyserythropoietic anemia, or sickle-cell anemia. In one embodiment, a TMPRSS6 iRNA is used to treat a hemoglobinopathy. The TMPRSS6 iRNAs of the invention can also be used to treat elevated levels of iron due to other conditions, such as chronic alcoholism.

[0572] In thalassemias, the bone marrow synthesizes insufficient amounts of a hemoglobin chain; this in turn reduces the production of red blood cells and causes anemia. Either the α or the B chain may be affected, but β thalassemias are more common. Newborn babies are healthy because their bodies still produce HbF, which does not have B chains; during the first few months of life, the bone marrow switches to producing HbA, and symptoms start to appear.

[0573] β-thalassemias result from mutation with either non-expressing (β°) or low expressing (β+) alleles of the HBB gene, β-thalassemias vary in severity depending on the genotype, and include minor/trait β-thalassemia (β/β° or β/β+), intermedia β-thalassemia (β°/β+), and major β-thalassemia (β°/β° or β″7 β+).

[0574] Thalassemia intermedia (TI) typically presents with little hemolysis, while major β-thalassemia (TM) is typically accompanied by abundant hemolysis which causes, e.g., anemia and splenomegaly; and highly ineffective erythropoiesis, which causes bone marrow drive (skeletal changes, otcopenia), increased erythropoietin synthesis, hepato-splenomegaly, consumption of haematinics (megablastic anemia), and high uric acid in blood. The iRNAs of the invention, e.g., TMPRSS6 iRNAs, are better suited for treating the iron overload that typically accompanies thalassemia's that are more TI like (e.g., for treating individuals having a β°/β+, β/β° or β/β+ genotype).

[0575] Symptoms of β-thalassemias also include, e.g., complication due to therapy, e.g., iron overload, which causes endocrinopathy, liver fibrosis and cardiac fibrosis. Administration of an iRNA agent that targets TMPRSS6 can be effective to treat one or more of these symptoms.

[0576] α-thalassemias result from mutation with either non-expressing (a°) or low expressing (a+) alleles of the HBA1 or HBA2 genes, orthalassemias vary in severity depending on the genotype, and include trait thalassemia (−α/αα), Hb Bart and Hydrops fetalis (a°/a°), α-Thalassemia minor (−/αα), (−α/−α), and HbH disease (−/−a). Lower α-globin chains arc produced, resulting in an excess of β chains in adults and excess γ chains in newborns. The excess β chains form unstable tetramers (called Hemoglobin H or HbH of 4 beta chains), which have abnormal oxygen dissociation curves. Administration of an iRNA agent that targets TMPRSS6 can be effective to treat iron overload in a subject who has an α-thalassemias.

[0577] Symptoms of hemochromatosis include, e.g., abdominal pain, joint pain, fatigue, lack of energy, weakness, darkening of the skin (often referred to as “bronzing”), and loss of body hair. Administration of an iRNA agent that targets TMPRSS6 can be effective to treat one or more of these symptoms.

[0578] Other symptoms associated with iron overload include increased risk for liver disease (cirrhosis, cancer), heart attack or heart failure, diabetes mellitus, osteoarthritis, osteoporosis, metabolic syndrome, hypothyroidism, hypogonadism, and in some cases premature death. Iron mismanagement resulting in overload can also accelerate such neurodegenerative diseases as Alzheimer's, early-onset Parkinson's, Huntington's, epilepsy and multiple sclerosis. Administration of an iRNA agent that targets TMPRSS6, e.g., an iRNA described in Tables 1 or 2 can treat one or more of these symptoms, or prevent the development or progression of a disease or disorder that is aggrevated by increased iron levels.

[0579] The methods of the invention further relate to the use of an iRNA agent or a pharmaceutical composition thereof, e.g., for treating a disorder associated with iron overload, in combination with other pharmaceuticals and/or other therapeutic methods, e.g., with known pharmaceuticals and/or known therapeutic methods, such as, for example, those which are currently employed for treating these disorders. For example, in certain embodiments, an iRNA agent targeting TMPRSS6 is administered in combination with, e.g., iron chelators (e.g., desferoxamine), folic acid, a blood transfusion, a phlebotomy, agents to manage ulcers, agents to increase fetal hemoglobin levels (e.g., hydroxyurea), agents to control infection (e.g., antibiotics and antivirals), agents to treat thrombotic state, or a stem cell or bone marrow transplant. A stem cell transplant can utilize stem cells from an umbilical cord, such as from a relative, e.g., a sibling. Exemplary iron chelators include desferoxamine, Deferasirox (Exjade), deferiprone, vitamin E, wheat germ oil, tocophersolan, and indicaxanthin.

[0580] The iRNA agent and an additional therapeutic agent can be administered in the same composition, e.g., parenterally, or the additional therapeutic agent can be administered as part of a separate composition or by another method described herein. Administration of the iRNA agent and the additional therapeutic agent can be at the same time, or at different times and, in any order.

[0581] Administration of the iRNA agent of the invention can lower iron levels, lower ferritin levels, and/or lower transferrin saturation levels. For example, administration of the dsRNA can lower serum iron levels and/or lower serum ferritin levels. Transferrin saturation levels can be lowered by 5%, 10%, 15%, 20%, 25%, 30%, 35%, 40%, 45%, 50%, 55%, 60%, 65%, 70%, 75%, 80%, 85%, or more. In another embodiment, the transferrin saturation levels remain lower for 7 days, 10 days, 20 days, 30 days, or more following administration.

[0582] Transferrin saturation levels can be lowered to below 50%, below 45%, below 40%, below 35%, below 35%, below 30%, below 25%, below 20%, below 15%, or lower. In another embodiment, the lower transferrin saturation levels are maintained for 7 days, 10 days, 20 days, 30 days, or more following administration. Transferrin saturation is a measure of the amount of iron bound to serum transferrin, and corresponds to the ratio of serum iron and total iron-binding capacity.

[0583] Serum iron levels can be lowered by 20%, 30%, 40%, 50%, 60%, 70%, 80%, 90%, or more. In another embodiment, the serum iron levels remain lower for 7 days, 10 days, 20 days, 30 days, or more following administration.

[0584] Administration of the iRNA agent of the invention preferably results in lowered iron levels in the blood, and more particularly in the serum, or in one or more tissues of the mammal. In some embodiments, iron levels are decreased by at least 10%, 15%, 20%, 25%, 30%, 40%, 50%, 60%, 70%, 80%, 90% or more, as compared to pretreatment levels.

[0585] By “lower” in this context is meant a statistically significant decrease in such level. The decrease can be, for example, at least 10%, at least 20%, at least 30%, at least 40% or more, and is preferably down to a level accepted as within the range of normal for an individual without such disorder.

[0586] Administration of the iRNA agent of the invention can increase serum hepcidin levels, and/or increase hepcidin gene expression. For example, administration of the dsRNA can increase serum hepcidin by at least about 10%, 25%, 50%, 100%, 150%, 200%, 250%, 300%, or more. In a further example, administration of the dsRNA can increase hepcidin mRNA levels by at least about 1.5-fold, 2-fold, 3-fold, 4-fold, 5-fold, or greater.

[0587] Efficacy of treatment or prevention of disease can be assessed, for example by measuring disease progression, disease remission, symptom severity, reduction in pain, quality of life, dose of a medication required to sustain a treatment effect, level of a disease marker or any other measurable parameter appropriate for a given disease being treated or targeted for prevention. It is well within the ability of one skilled in the art to monitor efficacy of treatment or prevention by measuring any one of such parameters, or any combination of parameters. For example, the levels of transferrin saturation or serum ferritin can be monitored for efficacy of a given treatment regime.

[0588] Iron level tests are typically performed on a sample of a patient's blood. An iron level test measure the amount of iron in the blood serum that is being carried by the proteins transferrin. A TIBC (Total iron-binding capacity) test measures the amount of iron that the blood would carry if the transferrin were fully saturated. Since transferrin is produced by the liver, the TIBC can be used to monitor liver function and nutrition. The transferrin test is a direct measure of transferrin (also called siderophilin) levels in the blood. The saturation level of transferrin can be calculated by dividing the serum iron level by the TIBC. The ferritin test measures the level of a protein in the blood that stores iron for later use by the body.

[0589] The iRNA treatments described herein can be used to treat individuals afflicted with a TMPRSS6 associated disorder, e.g., elevated iron levels, as may be indicated by iron levels in scrum e.g., iron levels measuring greater than 350 μg/dL, greater than 500 μg/dL, greater than 1000 μg/dL, or more. In an embodiment, elevated levels of iron in serum, e.g., greater than 15, 20, 25, or 30 mg/g dry weight.

[0590] The iRNA treatments described herein can also be used to treat individuals having elevated iron levels, as may be indicated by elevated ferritin levels in serum, e.g., ferritin levels measuring greater than 300 μg/L, greater than 500 μg/L, greater than 1000 μg/L, greater than 1500 μg/L, greater than 2000 μg/L, greater than 2500 μg/L, or 3000 μg/L, or more.

[0591] The iRNA treatments described herein can further be used to treat individuals having elevated iron levels, as may be indicated by elevated transferrin levels in serum, e.g., transferrin levels measuring greater than 400 mg/dL, greater than 500 mg/L, greater than 1000 mg/dL, or more.

[0592] The iRNA treatments described herein can also be used to treat individuals having moderately elevated iron levels, as may be indicated by moderately elevated transferrin saturation levels, e.g., saturation levels of 40%, 45%, or 50% or more. In addition, the treatment described herein may also be used to prevent elevated iron levels in individuals with only minor elevations in transferrin saturation. One of skill in the art can easily monitor the transferrin saturation levels in subjects receiving treatment with iRNA as described herein and assay for a reduction in transferrin saturation levels of at least 5% or 10%.

[0593] The iRNA treatments described herein can be used to treat individuals having elevated iron levels, as may be indicated by a TIBC value greater than 400 μg/dL, greater than 500 μg/dL, or greater than 1000 μg/dL, or more.

[0594] In some embodiments, individuals in need of treatment with an iRNA agent of the invention have decreased hematocrit levels, decreased hemoglobin levels, increased red blood cell distribution width, increased number of reticulocytes, decreased number of mature red blood cells, increased unsaturated iron binding capacity, decreased ineffective erythropoiesis, decreased extradedullary hematopoiesis, and/or decreased HAMP1 expression levels.

[0595] A patient can be further monitored by assay of blood sugar (glucose) level or a fetoprotein level, by echocardiogram (e.g., to examine the heart's function), electrocardiogram (ECG) (e.g., to look at the electrical activity of the heart), imaging tests (such as CT scans, MRI and ultrasound), and liver function tests. Excess iron staining or iron concentrations can be measured on liver biopsy samples, or to confirm the extent of liver damage, e.g., the stage of liver disease.

[0596] A treatment or preventive effect is evident when there is a statistically significant improvement in one or more parameters of disease status, or by a failure to worsen or to develop symptoms where they would otherwise be anticipated. As an example, a favorable change of at least 10% in a measurable parameter of disease, and preferably at least 20%, 30%, 40%, 50% or more can be indicative of effective treatment. Efficacy for a given iRNA drug or formulation of that drug can also be judged using an experimental animal model for the given disease as known in the art. When using an experimental animal model, efficacy of treatment is evidenced when a statistically significant reduction in a marker or symptom is observed.

[0597] Alternatively, the efficacy can be measured by a reduction in the severity of disease as determined by one skilled in the art of diagnosis based on a clinically accepted disease severity grading scale.

[0598] As used herein, a “subject” includes a human or non-human animal, preferably a vertebrate, and more preferably a mammal. A subject may include a transgenic organism. Most preferably, the subject is a human, such as a human suffering from or predisposed to developing a TMPRSS6 associated disorder.

[0599] In some embodiments of the methods of the invention, TMPRSS6 expression is decreased for an extended duration, e.g., at least one week, two weeks, three weeks, or four weeks or longer. For example, in certain instances, expression of the TMPRSS6 gene is suppressed by at least about 5%, 10%, 15%, 20%, 25%, 30%, 35%, 40%, 45%, 50%, 55%, 60%, 65%, 70%, 75%, 80%, 85%, 90%, 95%, 98%, or 100% by administration of an iRNA agent described herein. In some embodiments, the TMPRSS6 gene is suppressed by at least about 60%, 70%, or 80% by administration of the iRNA agent. In some embodiments, the TMPRSS6 gene is suppressed by at least about 85%, 90%, or 95% by administration of the double-stranded oligonucleotide. In another embodiment, the TMPRSS6 gene remains suppressed for 7 days, 10 days, 20 days, 30 days, or more following administration.

[0600] The RNAi agents of the invention may be administered to a subject using any mode of administration known in the art, including, but not limited to subcutaneous, intravenous, intramuscular, intraocular, intrabronchial, intrapleural, intraperitoneal, intraarterial, lymphatic, cerebrospinal, and any combinations thereof. In preferred embodiments, the agents are administered subcutaneously.

[0601] In some embodiments, the administration is via a depot injection. A depot injection may release the RNAi agent in a consistent way over a prolonged time period. Thus, a depot injection may reduce the frequency of dosing needed to obtain a desired effect, e.g., a desired inhibition of TMPRSS6, or a therapeutic or prophylactic effect. A depot injection may also provide more consistent serum concentrations. Depot injections may include subcutaneous injections or intramuscular injections. In preferred embodiments, the depot injection is a subcutaneous injection.

[0602] In some embodiments, the administration is via a pump. The pump may be an external pump or a surgically implanted pump. In certain embodiments, the pump is a subcutaneously implanted osmotic pump. In other embodiments, the pump is an infusion pump. An infusion pump may be used for intravenous, subcutaneous, arterial, or epidural infusions. In preferred embodiments, the infusion pump is a subcutaneous infusion pump. In other embodiments, the pump is a surgically implanted pump that delivers the RNAi agent to the liver.

[0603] Other modes of administration include epidural, intracerebral, intracerebroventricular, nasal administration, intraarterial, intracardiac, intraosseous infusion, intrathecal, and intravitreal, and pulmonary. The mode of administration may be chosen based upon whether local or systemic treatment is desired and based upon the area to be treated. The route and site of administration may be chosen to enhance targeting.

[0604] The method includes administering an iRNA agent, e.g., a dose sufficient to depress levels of TMPRSS6 mRNA for at least 5, more preferably 7, 10, 14, 21, 25, 30 or 40 days; and optionally, administering a second single dose of dsRNA, wherein the second single dose is administered at least 5, more preferably 7, 10, 14, 21, 25, 30 or 40 days after the first single dose is administered, thereby inhibiting the expression of the TMPRSS6 gene in a subject.

[0605] In one embodiment, doses of iRNA agent of the invention are administered not more than once every four weeks, not more than once every three weeks, not more than once every two weeks, or not more than once every week. In another embodiment, the administrations can be maintained for one, two, three, or six months, or one year or longer. In another embodiment, doses of iRNA agent of the invention are administered once a week for three weeks.

[0606] In general, the iRNA agent does not activate the immune system, e.g., it does not increase cytokine levels, such as TNF-alpha or IFN-alpha levels. For example, when measured by an assay, such as an in vitro PBMC assay, such as described herein, the increase in levels of TNF-alpha or IFN-alpha, is less than 30%, 20%, or 10% of control cells treated with a control dsRNA, such as a dsRNA that does not target TMPRSS6.

[0607] For example, a subject can be administered a therapeutic amount of an iRNA agent, such as 0.3 mg/kg, 0.5 mg/kg, 1.0 mg/kg, 1.5 mg/kg, 2.0 mg/kg, 2.5 mg/kg, or 3 mg/kg of dsRNA. The iRNA agent can be administered by intravenous infusion over a period of time, such as over a 5 minute, 10 minute, 15 minute, 20 minute, or 25 minute period. The administration is repeated, for example, on a regular basis, such as biweekly (i.e., every two weeks) for one month, two months, three months, four months or longer. After an initial treatment regimen, the treatments can be administered on a less frequent basis. For example, after administration biweekly for three months, administration can be repeated once per month, for six months or a year or longer. Administration of the iRNA agent can reduce TMPRSS6 levels, e.g., in a cell, tissue, blood, urine or other compartment of the patient by at least 10%, at least 15%, at least 20%, at least 25%, at least 30%, at least 40%, at least 50%, at least 60%, at least 70%, at least 80% or at least 90% or more.

[0608] Before administration of a full dose of the iRNA agent, patients can be administered a smaller dose, such as a dose resulting in less than 5% infusion reaction, and monitored for adverse effects, such as an allergic reaction, or for elevated lipid levels or blood pressure. In another example, the patient can be monitored for unwanted immunostimulatory effects, such as increased cytokine (e.g., TNF-alpha or INF-alpha) levels.

[0609] Many disorders associated with elevated iron levels are hereditary. Therefore, a patient in need of a TMPRSS6 iRNA may be identified by taking a family history. A healthcare provider, such as a doctor, nurse, or family member, can take a family history before prescribing or administering a TMPRSS6 dsRNA. A DNA test may also be performed on the patient to identify a mutation in the TMPRSS6 gene, before a TMPRSS6 dsRNA is administered to the patient. For example, diagnosis of hereditary hemochromatosis can be confirmed by identifying the two HFE (Hemochromatosis) gene mutations C282Y and H63D, according to GenBank Accession No. CAB07442.1 (GI: 1890180, record dated Oct. 23, 2008).

[0610] A treatment or preventive effect is evident when there is a statistically significant improvement in one or more parameters of disease status, or by a failure to worsen or to develop symptoms where they would otherwise be anticipated. As an example, a favorable change of at least 10% in a measurable parameter of disease, and preferably at least 20%, 30%, 40%, 50% or more can be indicative of effective treatment. Efficacy for a given iRNA agent of the invention or formulation of that iRNA agent can also be judged using an experimental animal model for the given disease as known in the art. When using an experimental animal model, efficacy of treatment is evidenced when a statistically significant reduction in a marker or symptom is observed.

[0611] In one embodiment, the RNAi agent is administered at a dose of between about 0.25 mg/kg to about 50 mg/kg, e.g., between about 0.25 mg/kg to about 0.5 mg/kg, between about 0.25 mg/kg to about 1 mg/kg, between about 0.25 mg/kg to about 5 mg/kg, between about 0.25 mg/kg to about 10 mg/kg, between about 1 mg/kg to about 10 mg/kg, between about 5 mg/kg to about 15 mg/kg, between about 10 mg/kg to about 20 mg/kg, between about 15 mg/kg to about 25 mg/kg, between about 20 mg/kg to about 30 mg/kg, between about 25 mg/kg to about 35 mg/kg, or between about 40 mg/kg to about 50 mg/kg.

[0612] In some embodiments, the RNAi agent is administered at a dose of about 0.25 mg/kg, about 0.5 mg/kg, about 1 mg/kg, about 2 mg/kg, about 3 mg/kg, about 4 mg/kg, about 5 mg/kg, about 6 mg/kg, about 7 mg/kg, about 8 mg/kg, about 9 mg/kg, about 10 mg/kg, about 11 mg/kg, about 12 mg/kg, about 13 mg/kg, about 14 mg/kg, about 15 mg/kg, about 16 mg/kg, about 17 mg/kg, about 18 mg/kg, about 19 mg/kg, about 20 mg/kg, about 21 mg/kg, about 22 mg/kg, about 23 mg/kg, about 24 mg/kg, about 25 mg/kg, about 26 mg/kg, about 27 mg/kg, about 28 mg/kg, about 29 mg/kg, 30 mg/kg, about 31 mg/kg, about 32 mg/kg, about 33 mg/kg, about 34 mg/kg, about 35 mg/kg, about 36 mg/kg, about 37 mg/kg, about 38 mg/kg, about 39 mg/kg, about 40 mg/kg, about 41 mg/kg, about 42 mg/kg, about 43 mg/kg, about 44 mg/kg, about 45 mg/kg, about 46 mg/kg, about 47 mg/kg, about 48 mg/kg, about 49 mg/kg or about 50 mg/kg.

[0613] In certain embodiments, for example, when a composition of the invention comprises a dsRNA as described herein and a lipid, subjects can be administered a therapeutic amount of iRNA, such as about 0.01 mg/kg to about 5 mg/kg, about 0.01 mg/kg to about 10 mg/kg, about 0.05 mg/kg to about 5 mg/kg, about 0.05 mg/kg to about 10 mg/kg, about 0.1 mg/kg to about 5 mg/kg, about 0.1 mg/kg to about 10 mg/kg, about 0.2 mg/kg to about 5 mg/kg, about 0.2 mg/kg to about 10 mg/kg, about 0.3 mg/kg to about 5 mg/kg, about 0.3 mg/kg to about 10 mg/kg, about 0.4 mg/kg to about 5 mg/kg, about 0.4 mg/kg to about 10 mg/kg, about 0.5 mg/kg to about 5 mg/kg, about 0.5 mg/kg to about 10 mg/kg, about 1 mg/kg to about 5 mg/kg, about 1 mg/kg to about 10 mg/kg, about 1.5 mg/kg to about 5 mg/kg, about 1.5 mg/kg to about 10 mg/kg, about 2 mg/kg to about about 2.5 mg/kg, about 2 mg/kg to about 10 mg/kg, about 3 mg/kg to about 5 mg/kg, about 3 mg/kg to about 10 mg/kg, about 3.5 mg/kg to about 5 mg/kg, about 4 mg/kg to about 5 mg/kg, about 4.5 mg/kg to about 5 mg/kg, about 4 mg/kg to about 10 mg/kg, about 4.5 mg/kg to about 10 mg/kg, about 5 mg/kg to about 10 mg/kg, about 5.5 mg/kg to about 10 mg/kg, about 6 mg/kg to about 10 mg/kg, about 6.5 mg/kg to about 10 mg/kg, about 7 mg/kg to about 10 mg/kg, about 7.5 mg/kg to about 10 mg/kg, about 8 mg/kg to about 10 mg/kg, about 8.5 mg/kg to about 10 mg/kg, about 9 mg/kg to about 10 mg/kg, or about 9.5 mg/kg to about 10 mg/kg. Values and ranges intermediate to the recited values are also intended to be part of this invention. For example, the dsRNA may be administered at a dose of about 0.1, 0.2, 0.3, 0.4, 0.5, 0.6, 0.7, 0.8, 0.9, 1, 1.1, 1.2, 1.3, 1.4, 1.5, 1.6, 1.7, 1.8, 1.9, 2, 2.1, 2.2, 2.3, 2.4, 2.5, 2.6, 2.7, 2.8, 2.9, 3, 3.1, 3.2, 3.3, 3.4, 3.5, 3.6, 3.7, 3.8, 3.9, 4, 4.1, 4.2, 4.3, 4.4, 4.5, 4.6, 4.7, 4.8, 4.9, 5, 5.1, 5.2, 5.3, 5.4, 5.5, 5.6, 5.7, 5.8, 5.9, 6, 6.1, 6.2, 6.3, 6.4, 6.5, 6.6, 6.7, 6.8, 6.9, 7, 7.1, 7.2, 7.3, 7.4, 7.5, 7.6, 7.7, 7.8, 7.9, 8, 8.1, 8.2, 8.3, 8.4, 8.5, 8.6, 8.7, 8.8, 8.9, 9, 9.1, 9.2, 9.3, 9.4, 9.5, 9.6, 9.7, 9.8, 9.9, or about 10 mg/kg. Values and ranges intermediate to the recited values are also intended to be part of this invention.

[0614] In certain embodiments of the invention, for example, when a double-stranded RNAi agent includes one or more modifications (e.g., motifs of three identical modifications on three consecutive nucleotides, including one such motif at or near the cleavage site of the agent), six phosphorothioate linkages, and a ligand, such an agent is administered at a dose of about 0.01 to about 0.5 mg/kg, about 0.01 to about 0.4 mg/kg, about 0.01 to about 0.3 mg/kg, about 0.01 to about 0.2 mg/kg, about 0.01 to about 0.1 mg/kg, about 0.01 mg/kg to about 0.09 mg/kg, about 0.01 mg/kg to about 0.08 mg/kg, about 0.01 mg/kg to about 0.07 mg/kg, about 0.01 mg/kg to about 0.06 mg/kg, about 0.01 mg/kg to about 0.05 mg/kg, about 0.02 to about 0.5 mg/kg, about 0.02 to about 0.4 mg/kg, about 0.02 to about 0.3 mg/kg, about 0.02 to about 0.2 mg/kg, about 0.02 to about 0.1 mg/kg, about 0.02 mg/kg to about 0.09 mg/kg, about 0.02 mg/kg to about 0.08 mg/kg, about 0.02 mg/kg to about 0.07 mg/kg, about 0.02 mg/kg to about 0.06 mg/kg, about 0.02 mg/kg to about 0.05 mg/kg, about 0.03 to about 0.5 mg/kg, about 0.03 to about 0.4 mg/kg, about 0.03 to about 0.3 mg/kg, about 0.03 to about 0.2 mg/kg, about 0.03 to about 0.1 mg/kg, about 0.03 mg/kg to about 0.09 mg/kg, about 0.03 mg/kg to about 0.08 mg/kg, about 0.03 mg/kg to about 0.07 mg/kg, about 0.03 mg/kg to about 0.06 mg/kg, about 0.03 mg/kg to about 0.05 mg/kg, about 0.04 to about 0.5 mg/kg, about 0.04 to about 0.4 mg/kg, about 0.04 to about 0.3 mg/kg, about 0.04 to about 0.2 mg/kg, about 0.04 to about 0.1 mg/kg, about 0.04 mg/kg to about 0.09 mg/kg, about 0.04 mg/kg to about 0.08 mg/kg, about 0.04 mg/kg to about 0.07 mg/kg, about 0.04 mg/kg to about 0.06 mg/kg, about 0.05 to about 0.5 mg/kg, about 0.05 to about 0.4 mg/kg, about 0.05 to about 0.3 mg/kg, about 0.05 to about 0.2 mg/kg, about 0.05 to about 0.1 mg/kg, about 0.05 mg/kg to about 0.09 mg/kg, about 0.05 mg/kg to about 0.08 mg/kg, or about 0.05 mg/kg to about 0.07 mg/kg. Values and ranges intermediate to the foregoing recited values are also intended to be part of this invention, e.g., the RNAi agent may be administered to the subject at a dose of about 0.015 mg/kg to about 0.45 mg/mg.

[0615] For example, the RNAi agent, e.g., RNAi agent in a pharmaceutical composition, may be administered at a dose of about 0.01 mg/kg, 0.0125 mg/kg, 0.015 mg/kg, 0.0175 mg/kg, 0.02 mg/kg, 0.0225 mg/kg, 0.025 mg/kg, 0.0275 mg/kg, 0.03 mg/kg, 0.0325 mg/kg, 0.035 mg/kg, 0.0375 mg/kg, 0.04 mg/kg, 0.0425 mg/kg, 0.045 mg/kg, 0.0475 mg/kg, 0.05 mg/kg, 0.0525 mg/kg, 0.055 mg/kg, 0.0575 mg/kg, 0.06 mg/kg, 0.0625 mg/kg, 0.065 mg/kg, 0.0675 mg/kg, 0.07 mg/kg, 0.0725 mg/kg, 0.075 mg/kg, 0.0775 mg/kg, 0.08 mg/kg, 0.0825 mg/kg, 0.085 mg/kg, 0.0875 mg/kg, 0.09 mg/kg, 0.0925 mg/kg, 0.095 mg/kg, 0.0975 mg/kg, 0.1 mg/kg, 0.125 mg/kg, 0.15 mg/kg, 0.175 mg/kg, 0.2 mg/kg, 0.225 mg/kg, 0.25 mg/kg, 0.275 mg/kg, 0.3 mg/kg, 0.325 mg/kg, 0.35 mg/kg, 0.375 mg/kg, 0.4 mg/kg, 0.425 mg/kg, 0.45 mg/kg, 0.475 mg/kg, or about 0.5 mg/kg. Values intermediate to the foregoing recited values are also intended to be part of this invention.

[0616] The dose of an RNAi agent that is administered to a subject may be tailored to balance the risks and benefits of a particular dose, for example, to achieve a desired level of TMPRSS6 gene suppression (as assessed, e.g., based on TMPRSS6 mRNA suppression, TMPRSS6 protein expression, or a reduction in lipid levels) or a desired therapeutic or prophylactic effect, while at the same time avoiding undesirable side effects.

[0617] In some embodiments, the RNAi agent is administered in two or more doses. If desired to facilitate repeated or frequent infusions, implantation of a delivery device, e.g., a pump, semi-permanent stent (e.g., intravenous, intraperitoneal, intracisternal or intracapsular), or reservoir may be advisable. In some embodiments, the number or amount of subsequent doses is dependent on the achievement of a desired effect, e.g., the suppression of a TMPRSS6 gene, or the achievement of a therapeutic or prophylactic effect, e.g., reducing iron overload. In some embodiments, the RNAi agent is administered according to a schedule. For example, the RNAi agent may be administered once per week, twice per week, three times per week, four times per week, or five times per week. In some embodiments, the schedule involves regularly spaced administrations, e.g., hourly, every four hours, every six hours, every eight hours, every twelve hours, daily, every 2 days, every 3 days, every 4 days, every 5 days, weekly, biweekly, or monthly. In other embodiments, the schedule involves closely spaced administrations followed by a longer period of time during which the agent is not administered. For example, the schedule may involve an initial set of doses that are administered in a relatively short period of time (e.g., about every 6 hours, about every 12 hours, about every 24 hours, about every 48 hours, or about every 72 hours) followed by a longer time period (e.g., about 1 week, about 2 weeks, about 3 weeks, about 4 weeks, about 5 weeks, about 6 weeks, about 7 weeks, or about 8 weeks) during which the RNAi agent is not administered. In one embodiment, the RNAi agent is initially administered hourly and is later administered at a longer interval (e.g., daily, weekly, biweekly, or monthly). In another embodiment, the RNAi agent is initially administered daily and is later administered at a longer interval (e.g., weekly, biweekly, or monthly). In certain embodiments, the longer interval increases over time or is determined based on the achievement of a desired effect. In a specific embodiment, the RNAi agent is administered once daily during a first week, followed by weekly dosing starting on the eighth day of administration. In another specific embodiment, the RNAi agent is administered every other day during a first week followed by weekly dosing starting on the eighth day of administration.

[0618] In some embodiments, the RNAi agent is administered in a dosing regimen that includes a “loading phase” of closely spaced administrations that may be followed by a “maintenance phase”, in which the RNAi agent is administered at longer spaced intervals. In one embodiment, the loading phase comprises five daily administrations of the RNAi agent during the first week. In another embodiment, the maintenance phase comprises one or two weekly administrations of the RNAi agent. In a further embodiment, the maintenance phase lasts for 5 weeks.

[0619] Any of these schedules may optionally be repeated for one or more iterations. The number of iterations may depend on the achievement of a desired effect, e.g., the suppression of a TMPRSS6 gene, and/or the achievement of a therapeutic or prophylactic effect, e.g., reducing iron levels or reducing a symptom of thalassemia, e.g., β-thalassemia, or hemochromatosis.

[0620] In another aspect, the invention features, a method of instructing an end user, e.g., a caregiver or a subject, on how to administer an iRNA agent described herein. The method includes, optionally, providing the end user with one or more doses of the iRNA agent, and instructing the end user to administer the iRNA agent on a regimen described herein, thereby instructing the end user.

### VII. Kits

[0621] The present invention also provides kits for using any of the iRNA agents and/or performing any of the methods of the invention. Such kits include one or more RNAi agent(s) and instructions for use, e.g., instructions for inhibiting expression of a TMPRSS6 in a cell by contacting the cell with the RNAi agent(s) in an amount effective to inhibit expression of the TMPRSS6. The kits may optionally further comprise means for contacting the cell with the RNAi agent (e.g., an injection device), or means for measuring the inhibition of TMPRSS6 (e.g., means for measuring the inhibition of TMPRSS6 mRNA or TTR protein). Such means for measuring the inhibition of TMPRSS6 may comprise a means for obtaining a sample from a subject, such as, e.g., a plasma sample. The kits of the invention may optionally further comprise means for administering the RNAi agent(s) to a subject or means for determining the therapeutically effective or prophylactically effective amount.

[0622] Unless otherwise defined, all technical and scientific terms used herein have the same meaning as commonly understood by one of ordinary skill in the art to which this invention belongs. Although methods and materials similar or equivalent to those described herein can be used in the practice or testing of the iRNAs and methods featured in the invention, suitable methods and materials are described below. All publications, patent applications, patents, and other references mentioned herein are incorporated by reference in their entirety. In case of conflict, the present specification, including definitions, will control. In addition, the materials, methods, and examples are illustrative only and not intended to be limiting.

### EXAMPLES

### Materials and Methods

[0623] The following materials and methods were used in the Examples.

cDNA Synthesis Using ABI High Capacity cDNA Reverse Transcription Kit (Applied Biosystems, Foster City, CA, Cat #4368813)

[0624] A master mix of 2 μl 10× Buffer, 0.8 μl 25×dNTPs, 2 μl Random primers, 1 μl Reverse Transcriptase, 1 μl RNase inhibitor and 3.2 μl of H₂O per reaction was added into 10 μl total RNA. cDNA was generated using a Bio-Rad C-1000 or S-1000 thermal cycler (Hercules, CA) through the following steps: 25° C. 10 min, 37° C. 120 min, 85° C. 5 sec, 4° C. hold.

### Cell Culture and Transfections

[0625] Hep3B cells (ATCC, Manassas, VA) were grown to near confluence at 37° C. in an atmosphere of 5% CO2 in EMEM (ATCC) supplemented with 10% FBS, streptomycin, and glutamine (ATCC) before being released from the plate by trypsinization. Transfection was carried out by adding 14.8 μl of Opti-MEM plus 0.2 μl of Lipofectamine RNAiMax per well (Invitrogen, Carlsbad CA. cat #13778-150) to 5 μl of siRNA duplexes per well into a 96-well plate and incubated at room temperature for 15 minutes. Subsequently, 80 μl of complete growth media without antibiotic containing ˜2×10⁴ Hep3B cells were then added to the siRNA mixture. Cells were incubated for 24 hours prior to RNA purification. Single dose experiments were performed at 10 nM and 0.1 nM final duplex concentration.

Total RNA Isolation Using DYNABEADS mRNA Isolation Kit (Invitrogen, Part #: 610-12)

[0626] Cells were harvested and lysed in 150 μl of Lysis/Binding Buffer then mixed for 5 minute at 850 rpm using a platform shaker (the mixing speed was the same throughout the process). Ten microliters of magnetic beads and 80 μl Lysis/Binding Buffer mixture were added to a round bottom plate and mixed for 1 minute. Magnetic beads were captured using magnetic stand and the supernatant was removed without disturbing the beads. After the supernatant was removed, the lysed cells were added to the remaining beads and mixed for 5 minutes. After the supernatant was removed, magnetic beads were washed 2 times with 150 μl Wash Buffer A and mixed for 1 minute. Beads were capture again and supernatant removed. Beads were then washed with 150 μl Wash Buffer B, captured and supernatant was removed. Beads were next washed with 150 μl Elution Buffer, captured and supernatant removed. Beads were allowed to dry for 2 minutes. After drying, 50 μl of Elution Buffer was added and mixed for 5 minutes at 75° C. Beads were captured on magnet for 5 minutes, and 50 μl of supernatant containing the purified RNA was removed and added to a new 96 well plate.

### Real Time PCR

[0627] Two μl of cDNA was added to a master mix containing 0.5 μl human GAPDH TaqMan Probe (Applied Biosystems Cat #4326317E), 0.5 μl human TMPRSS6 TaqMan probe (Applied Biosystems cat #Hs00542184_m1) and 5 μl Lightcycler 480 probe master mix (Roche Cat #04887301001) per well in a 384 well plate (Roche cat #04887301001). Real time PCR was performed in a Roche LC480 Real Time PCR system (Roche) using the ΔΔCt(RQ) assay. Each duplex was tested in two independent transfections and each transfection was assayed in duplicate, unless otherwise noted.

[0628] To calculate relative fold change, real time data were analyzed using the ΔΔCt method and normalized to assays performed with cells transfected with 10 nM AD-1955, or mock transfected cells.

The sense and antisense sequences of AD-1955 are:
SENSE:
(SEQ ID NO: 15)
5′-cuuAcGcuGAGuAcuucGAdTsdT-3′;
and
ANTISENSE:
(SEQ ID NO: 16)
5′-UCGAAGuACUcAGCGuAAGdTsdT-3′.

TABLE B
Abbreviations of nucleotide monomers used in nucleic
acid sequence representation.

| Abbreviation | Nucleotide(s) |
|---|---|
| A | Adenosine-3′-phosphate |
| Ab | beta-L-adenosine-3′-phosphate |
| Af | 2′-fluoroadenosine-3′-phosphate |
| Afs | 2′-fluoroadenosine-3′-phosphorothioate |
| As | adenosine-3′-phosphorothioate |
| C | cytidine-3′-phosphate |
| Cb | beta-L-cytidine-3′-phosphate |
| Cf | 2′-fluorocytidine-3′-phosphate |
| Cfs | 2′-fluorocytidine-3′-phosphorothioate |
| Cs | cytidine-3′-phosphorothioate |
| G | guanosine-3′-phosphate |
| Gb | beta-L-guanosine-3′-phosphate |
| Gbs | beta-L-guanosine-3′-phosphorothioate |
| Gf | 2′-fluoroguanosine-3′-phosphate |
| Gfs | 2′-fluoroguanosine-3′-phosphorothioate |
| Gs | guanosine-3′-phosphorothioate |
| T | 5′-methyluridine-3′-phosphate |
| Tf | 2′-fluoro-5-methyluridine-3′-phosphate |
| Tfs | 2′-fluoro-5-methyluridine-3′-phosphorothioate |
| Ts | 5-methyluridine-3′-phosphorothioate |
| U | Uridine-3′-phosphate |
| Uf | 2′-fluorouridine-3′-phosphate |
| Ufs | 2′-fluorouridine-3′-phosphorothioate |
| Us | uridine-3′-phosphorothioate |
| N | any nucleotide (G, A, C, T or U) |
| a | 2′-O-methyladenosine-3′-phosphate |
| as | 2′-O-methyladenosine-3′-phosphorothioate |
| c | 2′-O-methylcytidine-3′-phosphate |
| cs | 2′-O-methylcytidine-3′-phosphorothioate |
| g | 2′-O-methylguanosine-3′-phosphate |
| gs | 2′-O-methylguanosine-3′-phosphorothioate |
| t | 2′-O-methyl-5-methyluridine-3′-phosphate |
| ts | 2′-O-methyl-5-methyluridine-3′-phosphorothioate |
| u | 2′-O-methyluridine-3′-phosphate |
| us | 2′-O-methyluridine-3′-phosphorothioate |
| dT | 2′-deoxythymidine |
| dTs | 2′-deoxythymidine-3′-phosphorothioate |
| dU | 2′-deoxyuridine |
| s | phosphorothioate linkage |
| L96 | N-[tris(GalNAc-alkyl)-amidodecanoyl)]-4-hydroxyprolinol |
| | Hyp-(GalNAc-alkyl)3 |
| (Aeo) | 2′-O-methoxyethyladenosine-3′-phosphate |
| (Aeos) | 2′-O-methoxyethyladenosine-3′-phosphorothioate |
| (Geo) | 2′-O-methoxyethylguanosine-3′-phosphate |
| (Geos) | 2′-O-methoxyethylguanosine-3′-phosphorothioate |
| (Teo) | 2′-O-methoxyethyl-5-methyluridine-3′-phosphate |
| (Teos) | 2′-O-methoxyethyl-5-methyluridine-3′-phosphorothioate |
| (m5Ceo) | 2′-O-methoxyethyl-5-methylcytidine-3′-phosphate |
| (m5Ceos) | 2′-O-methoxyethyl-5-methylcytidine-3′-phosphorothioate |
| (A3m) | 3′-O-methyladenosine-2′-phosphate |
| (A3mx) | 3′-O-methyl-xylofuranosyladenosine-2′-phosphate |
| (G3m) | 3′-O-methylguanosine-2′-phosphate |
| (G3mx) | 3′-O-methyl-xylofuranosylguanosine-2′-phosphate |
| (C3m) | 3′-O-methylcytidine-2′-phosphate |
| (C3mx) | 3′-O-methyl-xylofuranosylcytidine-2′-phosphate |
| (U3m) | 3′-O-methyluridine-2′-phosphate |
| (U3mx) | 3′-O-methylxylouridine-2′-phosphate |
| (Chd) | 2′-O-hexadecyl-cytidine-3′-phosphate |
| (pshe) | Hydroxyethylphosphorothioate |
| (Uhd) | 2′-O-hexadecyl-uridine-3′-phosphate |
| (Tgn) | Thymidine-glycol nucleic acid (GNA) S-Isomer |
| (Cgn) | Cytidine-glycol nucleic acid (GNA) |
| (Chd) | 2′-O-hexadecyl-cytidine-3′-phosphate |
| (Ggn) | 2′-O-hexadecyl-cytidine-3′-phosphate |
| (Agn) | Adenosine-glycol nucleic acid (GNA) |
| P | 5′-phosphate |
| (m5Cam) | 2′-O-(N-methylacetamide)-5-methylcytidine-3′-phosphate |
| (m5Cams) | 2′-O-(N-methylacetamide)-5-methylcytidine-3′- |
| | phosphorothioate |
| (Tam) | 2′-O-(N-methylacetamide)thymidine-3′-phosphate |
| (Tams) | 2′-O-(N-methylacetamide)thymidine-3′-phosphorothioate |
| (Aam) | 2′-O-(N-methylacetamide)adenosine-3′-phosphate |
| (Aams) | 2′-O-(N-methylacetamide)adenosine-3′-phosphorothioate |
| (Gam) | 2′-O-(N-methylacetamide)guanosine-3′-phosphate |
| (Gams) | 2′-O-(N-methylacetamide)guanosine-3′-phosphorothioate |
| Y44 | 2-hydroxymethyl-tetrahydrofurane-5-phosphate |

### Example 1. Design, Specificity and Efficacy Prediction of Oligonucleotides

### Transcripts

[0629] siRNA design was carried out to identify siRNAs targeting human, rhesus (Macaca mulatta), mouse, and rat TMPRSS6 transcripts annotated in the NCBI Gene database (http://www.ncbi.nlm.nih.gov/gene/). Design used the following transcripts from the NCBI RefSeq collection: Human—NM_153609.2; Rhesus-XM_001085203.2 and XM_001085319.1; Mouse—NM_027902.2; Rat—NM_001130556.1. Due to high primate/rodent sequence divergence, siRNA duplexes were designed in several separate batches, including but not limited to batches containing duplexes matching human and rhesus transcripts only; human, rhesus, and mouse transcripts only; human, rhesus, mouse, and rat transcripts only; and mouse and rat transcripts only. All siRNA duplexes were designed that shared 100% identity with the listed human transcript and other species transcripts considered in each design batch (above).

[0630] The specificity of all possible 19mers was predicted from each sequence. Candidate 19mers that lacked repeats longer than 7 nucleotides were then selected. These 1259 candidate human/rhesus, 91 human/rhesus/mouse, 37 human/rhesus/mouse/rat, and 810 mouse/rat siRNAs were used in comprehensive searches against the appropriate transcriptomes (defined as the set of NM_ and XM_records within the human, rhesus, mouse, or rat NCBI Refseq sets) using an exhaustive “brute-force” algorithm implemented in the python script ‘BruteForce.py’. The script next parsed the transcript-oligo alignments to generate a score based on the position and number of mismatches between the siRNA and any potential ‘off-target’ transcript. The off-target score is weighted to emphasize differences in the ‘seed’ region of siRNAs, in positions 2-9 from the 5′ end of the molecule. Each oligo-transcript pair from the brute-force search was given a mismatch score by summing the individual mismatch scores; mismatches in the position 2-9 were counted as 2.8, mismatches in the cleavage site positions 10-11 were counted as 1.2, and mismatches in region 12-19 counted as 1.0. An additional off-target prediction was carried out by comparing the frequency of heptamers and octomers derived from 3 distinct, seed-derived hexamers of each oligo. The hexamers from positions 2-7 relative to the 5′ start were used to create 2 heptamers and one octomer. Heptamer1 was created by adding a 3′ A to the hexamer; heptamer2 was created by adding a 5′ A to the hexamer; the octomer was created by adding an A to both 5′ and 3′ ends of the hexamer. The frequency of octomers and heptamers in the human, rhesus, mouse, or rat 3′UTRome (defined as the subsequence of the transcriptome from NCBI's Refseq database where the end of the coding region, the ‘CDS’, is clearly defined) was pre-calculated. The octomer frequency was normalized to the heptamer frequency using the median value from the range of octomer frequencies. A ‘mirSeedScore’ was then calculated by calculating the sum of ((3×normalized octomer count)+(2×heptamer2 count)+(1×heptamer1 count)).

[0631] Both siRNA strands were assigned to a category of specificity according to the calculated scores: a score above 3 qualified as highly specific, equal to 3 as specific and between 2.2 and 2.8 qualified as moderately specific. The siRNAs were sorted by the specificity of the antisense strand. Duplexes from the human/rhesus and mouse/rat sets whose antisense oligos lacked GC at the first position, lacked G at both positions 13 and 14, and had 3 or more Us or As in the seed region (characteristics of duplexes with high predicted efficacy) were then selected. Similarly, duplexes from the human/rhesus/mouse and human/rhesus/mouse/rat sets that had had 3 or more Us or As in the seed region were selected.

[0632] Candidate GalNAc-conjugated duplexes, 21 and 23 nucleotides long on the sense and antisense strands respectively, were designed by extending antisense 19mers 4 additional nucleotides in the 3′ direction (preserving perfect complementarity with the target transcript). The sense strand was specified as the reverse complement of the first 21 nucleotides of the antisense 23mer. Duplexes were selected that maintained perfect matches to all selected species transcripts across all 23 nucleotides.

siRNA Sequence Selection

[0633] A total of 39 sense and 39 antisense derived human/rhesus, 6 sense and 6 antisense derived human/rhesus/mouse, 3 sense and 3 antisense derived human/rhesus/mouse/rat, and 16 sense and 16 antisense derived mouse/rat siRNA 21/23mer oligos were synthesized and formed into GalNAc-conjugated duplexes.

[0634] The sequences of the sense and antisense strands of the modified duplexes are shown in Table 1, and the sequences of the sense and antisense strands of the unmodified duplexes are shown in Table 2.

TABLE 1
TMPRSS6 modified sequences

| | Sense | | SEQ | | | SEQ |
|---|---|---|---|---|---|---|
| Duplex | sequence | | ID | Antisense | | ID |
| ID | ID | Sense sequence | NO: | sequence | Antisense sequence | NO: |
| AD- | A-119159.1 | UfsgsGfcCfuGfgAfGfAfgGfuGfuCfcUfuCfL96 | 17 | A-119160.1 | usUfsgAfaGfgAfcAfccuCfuCfcAfgGfcsCfsa | 65 |
| 58686.1 | | | | | | |
| AD- | A-119175.1 | GfsgsGfgUfgCfuAfCfUfcUfgGfuAfuUfuCfL96 | 18 | A-119176.1 | asGfsgAfaAfuAfcCfagaGfuAfgCfaCfcsCfsc | 66 |
| 58687.1 | | | | | | |
| AD- | A-119191.1 | CfsasAfcGfgCfcUfGfGfaUfgAfgAfgAfaAfL96 | 19 | A-119192.1 | asGfsuUfuCfuCfuCfaucCfaGfgCfcGfusUfsg | 67 |
| 58688.1 | | | | | | |
| AD- | A-119207.1 | AfsusCfgCfcAfcUfUfCfuCfcCfaGfgAfuCfL96 | 20 | A-119208.1 | asAfsgAfuCfcUfgGfgagAfaGfuGfgCfgsAfsu | 68 |
| 58689.1 | | | | | | |
| AD- | A-119223.1 | GfsgsUfgGfcAfgGfAfGfgUfgGfcAfuCfuUfL96 | 21 | A-119224.1 | asCfsaAfgAfuGfcCfaccUfcCfuGfcCfasCfsc | 69 |
| 58690.1 | | | | | | |
| AD- | A-119161.1 | GfsasCfcGfaCfuGfGfCfcAfuGfuAfuGfaCfL96 | 22 | A-119162.1 | asCfsgUfcAfuAfcAfuggCfcAfgUfcGfgsUfsc | 70 |
| 58692.1 | | | | | | |
| AD- | A-119177.1 | GfsgsUfgUfgCfgGfGfUfgCfaCfuAfuGfgCfL96 | 23 | A-119178.1 | asAfsgCfcAfuAfgUfgcaCfcCfgCfaCfasCfsc | 71 |
| 58693.1 | | | | | | |
| AD- | A-119193.1 | GfsgsCfcUfgGfaUfGfAfgAfgAfaAfcUfgCfL96 | 24 | A-119194.1 | asCfsgCfaGfuUfuCfucuCfaUfcCfaGfgsCfsc | 72 |
| 58694.1 | | | | | | |
| AD- | A-119209.1 | CfsusCfuGfgUfaUfUfUfcCfuAfgGfgUfaCfL96 | 25 | A-119210.1 | usUfsgUfaCfcCfuAfggaAfaUfaCfcAfgsAfsg | 73 |
| 58695.1 | | | | | | |
| AD- | A-119225.1 | GfscsCfcCfuGfgUfCfUfaAfcUfuGfgGfaUfL96 | 26 | A-119226.1 | asGfsaUfcCfcAfaGfuuaGfaCfcAfgGfgsGfsc | 74 |
| 58696.1 | | | | | | |
| AD- | A-119163.1 | GfsasGfgCfaGfaAfGfUfaUfgAfuUfuGfcCfL96 | 27 | A-119164.1 | asCfsgGfcAfaAfuCfauaCfuUfcUfgCfcsUfsc | 75 |
| 58698.1 | | | | | | |
| AD- | A-119179.1 | AfsasGfcCfaGfuGfUfGfaAfaGfaCfaUfaGfL96 | 28 | A-119180.1 | asGfscUfaUfgUfcUfuucAfcAfcUfgGfcsUfsu | 76 |
| 58699.1 | | | | | | |
| AD- | A-119195.1 | GfscsCfgGfgAfcCfGfAfcUfgGfcCfaUfgUfL96 | 29 | A-119196.1 | asUfsaCfaUfgGfcCfaguCfgGfuCfcCfgsGfsc | 77 |
| 58700.1 | | | | | | |
| AD- | A-119211.1 | CfsusCfcAfgGfuUfCfGfgGfgUfcGfaCfaCfL96 | 30 | A-119212.1 | asUfsgUfgUfcGfaCfcccGfaAfcCfuGfgsAfsg | 78 |
| 58701.1 | | | | | | |
| AD- | A-119227.1 | AfsgsCfcCfcUfgGfUfCfuAfaCfuUfgGfgAfL96 | 31 | A-119228.1 | gsAfsuCfcCfaAfgUfuagAfcCfaGfgGfgsCfsu | 79 |
| 58702.1 | | | | | | |
| AD- | A-119165.1 | UfscsGfcCfaCfuUfCfUfcCfcAfgGfaUfcUfL96 | 32 | A-119166.1 | usAfsaGfaUfcCfuGfggaGfaAfgUfgGfcsGfsa | 80 |
| 58704.1 | | | | | | |
| AD- | A-119181.1 | AfscsUfcUfgGfuAfUfUfuCfcUfaGfgGfuAfL96 | 33 | A-119182.1 | usGfsuAfcCfcUfaGfgaaAfuAfcCfaGfasGfsu | 81 |
| 58705.1 | | | | | | |
| AD- | A-119197.1 | UfscsGfcUfgAfcCfGfCfuGfgGfuGfaUfaAfL96 | 34 | A-119198.1 | usGfsuUfaUfcAfcCfcagCfgGfuCfaGfcsGfsa | 82 |
| 58706.1 | | | | | | |
| AD- | A-119213.1 | GfscsCfcCfaAfcGfGfCfcUfgGfaUfgAfgAfL96 | 35 | A-119214.1 | usCfsuCfuCfaUfcCfaggCfcGfuUfgGfgsGfsc | 83 |
| 58707.1 | | | | | | |
| AD- | A-119229.1 | GfscsCfaAfgCfaGfGfGfgGfaCfaAfgUfaUfL96 | 36 | A-119230.1 | gsAfsaUfaCfuUfgUfcccCfcUfgCfuUfgsGfsc | 84 |
| 58708.1 | | | | | | |
| AD- | A-119167.1 | UfscsCfcCfuAfcAfGfGfgCfcGfaGfuAfcGfL96 | 37 | A-119168.1 | usUfscGfuAfcUfcGfgccCfuGfuAfgGfgsGfsa | 85 |
| 58710.1 | | | | | | |
| AD- | A-119183.1 | CfsusGfgGfuUfgUfUfAfcCfgCfuAfcAfgCfL96 | 38 | A-119184.1 | usAfsgCfuGfuAfgCfgguAfaCfaAfcCfcsAfsg | 86 |
| 58711.1 | | | | | | |
| AD- | A-119199.1 | CfsusGfgCfcUfgGfAfGfaGfgUfgUfcCfuUfL96 | 39 | A-119200.1 | usGfsaAfgGfaCfaCfcucUfcCfaGfgCfcsAfsg | 87 |
| 58712.1 | | | | | | |
| AD- | A-119215.1 | GfsusGfcGfgGfuGfCfAfcUfaUfgGfcUfuGfL96 | 40 | A-119216.1 | usAfscAfaGfcCfaUfaguGfcAfcCfcGfcsAfsc | 88 |
| 58713.1 | | | | | | |
| AD- | A-119231.1 | UfsgsGfcAfgGfaGfGfUfgGfcAfuCfuUfgUfL96 | 41 | A-119232.1 | asGfsaCfaAfgAfuGfccaCfcUfcCfuGfcsCfsa | 89 |
| 58714.1 | | | | | | |
| AD- | A-119169.1 | CfscsCfuAfcAfgGfGfCfcGfaGfuAfcGfaAfL96 | 42 | A-119170.1 | asCfsuUfcGfuAfcUfcggCfcCfuGfuAfgsGfsg | 90 |
| 58716.1 | | | | | | |
| AD- | A-119185.1 | AfscsCfuGfcUfuCfUfUfcUfgGfuUfcAfuUfL96 | 43 | A-119186.1 | asGfsaAfuGfaAfcCfagaAfgAfaGfcAfgsGfsu | 91 |
| 58717.1 | | | | | | |
| AD- | A-119201.1 | UfsgsCfcUfgUfgAfUfGfgGfgUfcAfaGfgAfL96 | 44 | A-119202.1 | asGfsuCfcUfuGfaCfcccAfuCfaCfaGfgsCfsa | 92 |
| 58718.1 | | | | | | |
| AD- | A-119217.1 | CfsasGfcUfuCfgGfAfAfgCfcCfcUfgGfuCfL96 | 45 | A-119218.1 | usAfsgAfcCfaGfgGfgcuUfcCfgAfaGfcsUfsg | 93 |
| 58719.1 | | | | | | |
| AD- | A-119233.1 | CfscsCfcUfgGfuCfUfAfaCfuUfgGfgAfuCfL96 | 46 | A-119234.1 | csAfsgAfuCfcCfaAfguuAfgAfcCfaGfgsGfsg | 94 |
| 58720.1 | | | | | | |
| AD- | A-119171.1 | UfsgsCfuUfcUfuCfUfGfgUfuCfaUfuCfuCfL96 | 47 | A-119172.1 | usGfsgAfgAfaUfgAfaccAfgAfaGfaAfgsCfsa | 95 |
| 58721.1 | | | | | | |
| AD- | A-119187.1 | CfscsCfaAfcGfgCfCfUfgGfaUfgAfgAfgAfL96 | 48 | A-119188.1 | usUfsuCfuCfuCfaUfccaGfgCfcGfuUfgsGfsg | 96 |
| 58722.1 | | | | | | |
| AD- | A-119203.1 | AfsasGfgGfcCfuGfCfAfcAfgCfuAfcUfaCfL96 | 49 | A-119204.1 | usCfsgUfaGfuAfgCfuguGfcAfgGfcCfcsUfsu | 97 |
| 58723.1 | | | | | | |
| AD- | A-119219.1 | GfsusCfuAfaCfuUfGfGfgAfuCfuGfgGfaAfL96 | 50 | A-119220.1 | csAfsuUfcCfcAfgAfuccCfaAfgUfuAfgsAfsc | 98 |
| 58724.1 | | | | | | |
| AD- | A-119235.1 | AfsgsCfuUfcGfgAfAfGfcCfcCfuGfgUfcUfL96 | 51 | A-119236.1 | usUfsaGfaCfcAfgGfggcUfuCfcGfaAfgsCfsu | 99 |
| 58725.1 | | | | | | |
| AD- | A-119173.1 | CfscsAfgUfgUfgAfAfAfgAfcAfuAfgCfuGfL96 | 52 | A-119174.1 | usGfscAfgCfuAfuGfucuUfuCfaCfaCfusGfsg | 100 |
| 58726.1 | | | | | | |
| AD- | A-119189.1 | CfscsAfgGfuUfcGfGfGfgUfcGfaCfaCfaUfL96 | 53 | A-119190.1 | asGfsaUfgUfgUfcGfaccCfcGfaAfcCfusGfsg | 101 |
| 58727.1 | | | | | | |
| AD- | A-119205.1 | UfscsCfaCfgCfuGfGfGfuUfgUfuAfcCfgCfL96 | 54 | A-119206.1 | usAfsgCfgGfuAfaCfaacCfcAfgCfgUfgsGfsa | 102 |
| 58728.1 | | | | | | |
| AD- | A-119221.1 | UfsgsCfcAfaGfcAfGfGfgGfgAfcAfaGfuAfL96 | 55 | A-119222.1 | asAfsuAfcUfuGfuCfcccCfuGfcUfuGfgsCfsa | 103 |
| 58729.1 | | | | | | |
| AD- | A-119241.1 | AfsusCfcAfgAfaCfAfGfgAfgGfcUfgUfgUfL96 | 56 | A-119242.1 | csCfsaCfaCfaGfcCfuccUfgUfuCfuGfgsAfsu | 104 |
| 58697.1 | | | | | | |
| AD- | A-119243.1 | UfsusCfaCfcUfcCfCfAfgAfuCfuCfcCfuCfL96 | 57 | A-119244.1 | gsUfsgAfgGfgAfgAfucuGfgGfaGfgUfgsAfsa | 105 |
| 58703.1 | | | | | | |
| AD- | A-119245.1 | CfscsUfcCfgAfgGfGfUfgAfgUfgGfcCfaUfL96 | 58 | A-119246.1 | csCfsaUfgGfcCfaCfucaCfcCfuCfgGfasGfsg | 106 |
| 58709.1 | | | | | | |
| AD- | A-119247.1 | UfscsCfaGfaAfcAfGfGfaGfgCfuGfuGfuGfL96 | 59 | A-119248.1 | gsCfscAfcAfcAfgCfcucCfuGfuUfcUfgsGfsa | 107 |
| 58715.1 | | | | | | |
| AD- | A-119237.1 | GfsusGfuCfcUfcCfGfAfgGfgUfgAfgUfgGfL96 | 60 | A-119238.1 | gsGfscCfaCfuCfaCfccuCfgGfaGfgAfcsAfsc | 108 |
| 58730.1 | | | | | | |
| AD- | A-119249.1 | UfsusCfgGfgGfuCfGfAfcAfcAfuCfuGfuGfL96 | 61 | A-119250.1 | csCfscAfcAfgAfuGfuguCfgAfcCfcCfgsAfsa | 109 |
| 58731.1 | | | | | | |
| AD- | A-119251.1 | UfscsGfgGfgUfcGfAfCfaCfaUfcUfgUfgGfL96 | 62 | A-119252.1 | csCfscCfaCfaGfaUfgugUfcGfaCfcCfcsGfsa | 110 |
| 58734.1 | | | | | | |
| AD- | A-119253.1 | UfsgsCfuUfcCfaGfGfAfgGfaCfaGfcAfuGfL96 | 63 | A-119254.1 | gsCfscAfuGfcUfgUfccuCfcUfgGfaAfgsCfsa | 111 |
| 58737.1 | | | | | | |
| AD- | A-120243.1 | UfscsUfgGfuAfuUfUfCfcUfaGfgGfuAfcAfL96 | 64 | A-120244.1 | usGfsuAfcCfcUfaGfgaaAfuAfcCfaGfasgsu | 112 |
| 59743.1 | | | | | | |

TABLE 2
TMPRSS6 unmodified sequences

| | Sense | | SEQ | | | | SEQ | |
|---|---|---|---|---|---|---|---|---|
| Duplex | sequence | | ID | Position in | Antisense | | ID | Position in |
| ID | ID | Sense sequence | NO: | NM_153609.2 | sequence | Antisense sequence | NO: | NM_153609.2 |
| AD- | A- | UGGCCUGGAGAGGUGUCCUUC | 113 | 2041-2063 | A- | UUGAAGGACACCUCUCCAGGCCA | 161 | 2041-2063 |
| 58686.1 | 119159.1 | | | | 119160.1 | | | |
| AD- | A- | GGGGUGCUACUCUGGUAUUUC | 114 | 319-341 | A- | AGGAAAUACCAGAGUAGCACCCC | 162 | 319-341 |
| 58687.1 | 119175.1 | | | | 119176.1 | | | |
| AD- | A- | CAACGGCCUGGAUGAGAGAAA | 115 | 1557-1579 | A- | AGUUUCUCUCAUCCAGGCCGUUG | 163 | 1557-1579 |
| 58688.1 | 119191.1 | | | | 119192.1 | | | |
| AD- | A- | AUCGCCACUUCUCCCAGGAUC | 116 | 401-423 | A- | AAGAUCCUGGGAGAAGUGGCGAU | 164 | 401-423 |
| 58689.1 | 119207.1 | | | | 119208.1 | | | |
| AD- | A- | GGUGGCAGGAGGUGGCAUCUU | 117 | 2665-2688 | A- | ACAAGAUGCCACCUCCUGCCACC | 165 | 2665-2688 |
| 58690.1 | 119223.1 | | | | 119224.1 | | | |
| AD- | A- | GACCGACUGGCCAUGUAUGAC | 118 | 922-944 | A- | ACGUCAUACAUGGCCAGUCGGUC | 166 | 922-944 |
| 58692.1 | 119161.1 | | | | 119162.1 | | | |
| AD- | A- | GGUGUGCGGGUGCACUAUGGC | 119 | 1444-1466 | A- | AAGCCAUAGUGCACCCGCACACC | 167 | 1444-1466 |
| 58693.1 | 119177.1 | | | | 119178.1 | | | |
| AD- | A- | GGCCUGGAUGAGAGAAACUGC | 120 | 1561-1583 | A- | ACGCAGUUUCUCUCAUCCAGGCC | 168 | 1561-1583 |
| 58694.1 | 119193.1 | | | | 119194.1 | | | |
| AD- | A- | CUCUGGUAUUUCCUAGGGUAC | 121 | 328-350 | A- | UUGUACCCUAGGAAAUACCAGAG | 169 | 328-350 |
| 58695.1 | 119209.1 | | | | 119210.1 | | | |
| AD- | A- | GCCCCUGGUCUAACUUGGGAU | 122 | 2966-2989 | A- | AGAUCCCAAGUUAGACCAGGGGC | 170 | 2966-2989 |
| 58696.1 | 119225.1 | | | | 119226.1 | | | |
| AD- | A- | GAGGCAGAAGUAUGAUUUGCC | 123 | 1281-1303 | A- | ACGGCAAAUCAUACUUCUGCCUC | 171 | 1281-1303 |
| 58698.1 | 119163.1 | | | | 119164.1 | | | |
| AD- | A- | AAGCCAGUGUGAAAGACAUAG | 124 | 731-753 | A- | AGCUAUGUCUUUCACACUGGCUU | 172 | 731-753 |
| 58699.1 | 119179.1 | | | | 119180.1 | | | |
| AD- | A- | GCCGGGACCGACUGGCCAUGU | 125 | 917-939 | A- | AUACAUGGCCAGUCGGUCCCGGC | 173 | 917-939 |
| 58700.1 | 119195.1 | | | | 119196.1 | | | |
| AD- | A- | CUCCAGGUUCGGGGUCGACAC | 126 | 1894-1916 | A- | AUGUGUCGACCCCGAACCUGGAG | 174 | 1894-1916 |
| 58701.1 | 119211.1 | | | | 119212.1 | | | |
| AD- | A- | AGCCCCUGGUCUAACUUGGGA | 127 | 2965-2988 | A- | GAUCCCAAGUUAGACCAGGGGCU | 175 | 2965-2988 |
| 58702.1 | 119227.1 | | | | 119228.1 | | | |
| AD- | A- | UCGCCACUUCUCCCAGGAUCU | 128 | 402-424 | A- | UAAGAUCCUGGGAGAAGUGGCGA | 176 | 402-424 |
| 58704.1 | 119165.1 | | | | 119166.1 | | | |
| AD- | A- | ACUCUGGUAUUUCCUAGGGUA | 129 | 327-349 | A- | UGUACCCUAGGAAAUACCAGAGU | 177 | 327-349 |
| 58705.1 | 119181.1 | | | | 119182.1 | | | |
| AD- | A- | UCGCUGACCGCUGGGUGAUAA | 130 | 1934-1956 | A- | UGUUAUCACCCAGCGGUCAGCGA | 178 | 1934-1956 |
| 58706.1 | 119197.1 | | | | 119198.1 | | | |
| AD- | A- | GCCCCAACGGCCUGGAUGAGA | 131 | 1553-1575 | A- | UCUCUCAUCCAGGCCGUUGGGGC | 179 | 1553-1575 |
| 58707.1 | 119213.1 | | | | 119214.1 | | | |
| AD- | A- | GCCAAGCAGGGGGACAAGUAU | 132 | 2610-2633 | A- | GAAUACUUGUCCCCCUGCUUGGC | 180 | 2610-2633 |
| 58708.1 | 119229.1 | | | | 119230.1 | | | |
| AD- | A- | UCCCCUACAGGGCCGAGUACG | 133 | 680-702 | A- | UUCGUACUCGGCCCUGUAGGGGA | 181 | 680-702 |
| 58710.1 | 119167.1 | | | | 119168.1 | | | |
| AD- | A- | CUGGGUUGUUACCGCUACAGC | 134 | 769-791 | A- | UAGCUGUAGCGGUAACAACCCAG | 182 | 769-791 |
| 58711.1 | 119183.1 | | | | 119184.1 | | | |
| AD- | A- | CUGGCCUGGAGAGGUGUCCUU | 135 | 2040-2062 | A- | UGAAGGACACCUCUCCAGGCCAG | 183 | 2040-2062 |
| 58712.1 | 119199.1 | | | | 119200.1 | | | |
| AD- | A- | GUGCGGGUGCACUAUGGCUUG | 136 | 1447-1469 | A- | UACAAGCCAUAGUGCACCCGCAC | 184 | 1447-1469 |
| 58713.1 | 119215.1 | | | | 119216.1 | | | |
| AD- | A- | UGGCAGGAGGUGGCAUCUUGU | 137 | 2667-2690 | A- | AGACAAGAUGCCACCUCCUGCCA | 185 | 2667-2690 |
| 58714.1 | 119231.1 | | | | 119232.1 | | | |
| AD- | A- | CCCUACAGGGCCGAGUACGAA | 138 | 682-704 | A- | ACUUCGUACUCGGCCCUGUAGGG | 186 | 682-704 |
| 58716.1 | 119169.1 | | | | 119170.1 | | | |
| AD- | A- | ACCUGCUUCUUCUGGUUCAUU | 139 | 559-581 | A- | AGAAUGAACCAGAAGAAGCAGGU | 187 | 559-581 |
| 58717.1 | 119185.1 | | | | 119186.1 | | | |
| AD- | A- | UGCCUGUGAUGGGGUCAAGGA | 140 | 1530-1552 | A- | AGUCCUUGACCCCAUCACAGGCA | 188 | 1530-1552 |
| 58718.1 | 119201.1 | | | | 119202.1 | | | |
| AD- | A- | CAGCUUCGGAAGCCCCUGGUC | 141 | 2955-2978 | A- | UAGACCAGGGGCUUCCGAAGCUG | 189 | 2955-2978 |
| 58719.1 | 119217.1 | | | | 119218.1 | | | |
| AD- | A- | CCCCUGGUCUAACUUGGGAUC | 142 | 2967-2990 | A- | CAGAUCCCAAGUUAGACCAGGGG | 190 | 2967-2990 |
| 58720.1 | 119233.1 | | | | 119234.1 | | | |
| AD- | A- | UGCUUCUUCUGGUUCAUUCUC | 143 | 562-584 | A- | UGGAGAAUGAACCAGAAGAAGCA | 191 | 562-584 |
| 58721.1 | 119171.1 | | | | 119172.1 | | | |
| AD- | A- | CCCAACGGCCUGGAUGAGAGA | 144 | 1555-1577 | A- | UUUCUCUCAUCCAGGCCGUUGGG | 192 | 1555-1577 |
| 58722.1 | 119187.1 | | | | 119188.1 | | | |
| AD- | A- | AAGGGCCUGCACAGCUACUAC | 145 | 1054-1076 | A- | UCGUAGUAGCUGUGCAGGCCCUU | 193 | 1054-1076 |
| 58723.1 | 119203.1 | | | | 119204.1 | | | |
| AD- | A- | GUCUAACUUGGGAUCUGGGAA | 146 | 2973-2996 | A- | CAUUCCCAGAUCCCAAGUUAGAC | 194 | 2973-2996 |
| 58724.1 | 119219.1 | | | | 119220.1 | | | |
| AD- | A- | AGCUUCGGAAGCCCCUGGUCU | 147 | 2956-2979 | A- | UUAGACCAGGGGCUUCCGAAGCU | 195 | 2956-2979 |
| 58725.1 | 119235.1 | | | | 119236.1 | | | |
| AD- | A- | CCAGUGUGAAAGACAUAGCUG | 148 | 734-756 | A- | UGCAGCUAUGUCUUUCACACUGG | 196 | 734-756 |
| 58726.1 | 119173.1 | | | | 119174.1 | | | |
| AD- | A- | CCAGGUUCGGGGUCGACACAU | 149 | 1896-1918 | A- | AGAUGUGUCGACCCCGAACCUGG | 197 | 1896-1918 |
| 58727.1 | 119189.1 | | | | 119190.1 | | | |
| AD- | A- | UCCACGCUGGGUUGUUACCGC | 150 | 763-785 | A- | UAGCGGUAACAACCCAGCGUGGA | 198 | 763-785 |
| 58728.1 | 119205.1 | | | | 119206.1 | | | |
| AD- | A- | UGCCAAGCAGGGGGACAAGUA | 151 | 2609-2632 | A- | AAUACUUGUCCCCCUGCUUGGCA | 199 | 2609-2632 |
| 58729.1 | 119221.1 | | | | 119222.1 | | | |
| AD- | A- | AUCCAGAACAGGAGGCUGUGU | 152 | 1324-1346 | A- | CCACACAGCCUCCUGUUCUGGAU | 200 | 1324-1346 |
| 58697.1 | 119241.1 | | | | 119242.1 | | | |
| AD- | A- | UUCACCUCCCAGAUCUCCCUC | 153 | 1414-1436 | A- | GUGAGGGAGAUCUGGGAGGUGAA | 201 | 1414-1436 |
| 58703.1 | 119243.1 | | | | 119244.1 | | | |
| AD- | A- | CCUCCGAGGGUGAGUGGCCAU | 154 | 1862-1884 | A- | CCAUGGCCACUCACCCUCGGAGG | 202 | 1862-1884 |
| 58709.1 | 119245.1 | | | | 119246.1 | | | |
| AD- | A- | UCCAGAACAGGAGGCUGUGUG | 155 | 1325-1347 | A- | GCCACACAGCCUCCUGUUCUGGA | 203 | 1325-1347 |
| 58715.1 | 119247.1 | | | | 119248.1 | | | |
| AD- | A- | GUGUCCUCCGAGGGUGAGUGG | 156 | 1858-1880 | A- | GGCCACUCACCCUCGGAGGACAC | 204 | 1858-1880 |
| 58730.1 | 119237.1 | | | | 119238.1 | | | |
| AD- | A- | UUCGGGGUCGACACAUCUGUG | 157 | 1901-1923 | A- | CCCACAGAUGUGUCGACCCCGAA | 205 | 1901-1923 |
| 58731.1 | 119249.1 | | | | 119250.1 | | | |
| AD- | A- | UCGGGGUCGACACAUCUGUGG | 158 | 1902-1924 | A- | CCCCACAGAUGUGUCGACCCCGA | 206 | 1902-1924 |
| 58734.1 | 119251.1 | | | | 119252.1 | | | |
| AD- | A- | UGCUUCCAGGAGGACAGCAUG | 159 | 1966-1988 | A- | GCCAUGCUGUCCUCCUGGAAGCA | 207 | 1966-1988 |
| 58737.1 | 119253.1 | | | | 119254.1 | | | |
| AD- | A- | UCUGGUAUUUCCUAGGGUACA | 160 | | A- | UGUACCCUAGGAAAUACCAGAGU | 208 | |
| 59743.1 | 120243.1 | | | | 120244.1 | | | |

### Example 2. In Vitro Single Dose Screen

[0635] The modified and conjugated TMPRSS6 siRNA duplexes were also evaluated for efficacy by transfection assays in human cell line Hep3B. TMPRSS6 siRNAs were transfected at two doses, 10 nM and 0.1 nM. The results of these assays are shown in Table 3 and the data are expressed as a fraction of the message remaining in cells transfected with siRNAs targeting TMPRSS6, relative to cells transfected with a negative control siRNA, AD-1955+ the standard deviation (SD).

TABLE 3
TMPRSS6 single dose screen.

| Duplex ID | Avg 10 nM | SD 10 nM | Avg 0.1 nM | SD 0.1 nM |
|---|---|---|---|---|
| AD-58686.1 | 71.58 | 18.94 | 103.29 | 32.00 |
| AD-58687.1 | 89.33 | 13.14 | 104.94 | 20.06 |
| AD-58688.1 | 34.16 | 11.36 | 87.18 | 8.43 |
| AD-58689.1 | 79.82 | 7.28 | 110.37 | 6.08 |
| AD-58690.1 | 69.10 | 9.83 | 99.92 | 24.84 |
| AD-58692.1 | 79.21 | 5.67 | 136.49 | 0.84 |
| AD-58693.1 | 77.29 | 12.12 | 106.01 | 17.97 |
| AD-58694.1 | 50.51 | 10.36 | 89.47 | 3.84 |
| AD-58695.1 | 54.37 | 5.75 | 87.66 | 13.59 |
| AD-58696.1 | 93.26 | 0.06 | 84.79 | 3.84 |
| AD-58697.1 | 72.95 | 23.41 | 98.98 | 10.29 |
| AD-58698.1 | 42.61 | 7.81 | 109.98 | 16.78 |
| AD-58699.1 | 24.93 | 8.58 | 79.71 | 12.55 |
| AD-58700.1 | 74.10 | 15.37 | 89.75 | 7.80 |
| AD-58701.1 | 79.18 | 8.18 | 89.70 | 9.98 |
| AD-58702.1 | 96.43 | 18.38 | 113.05 | 10.65 |
| AD-58703.1 | 79.15 | 28.50 | 97.30 | 6.79 |
| AD-58704.1 | 67.92 | 0.87 | 92.26 | 1.24 |
| AD-58705.1 | 59.50 | 20.47 | 99.25 | 3.28 |
| AD-58706.1 | 71.67 | 0.75 | 102.38 | 14.88 |
| AD-58707.1 | 77.89 | 22.26 | 97.52 | 1.31 |
| AD-58708.1 | 73.87 | 9.61 | 98.38 | 1.81 |
| AD-58709.1 | 94.62 | 4.69 | 100.73 | 16.10 |
| AD-58710.1 | 59.19 | 10.57 | 95.23 | 11.99 |
| AD-58711.1 | 63.62 | 16.83 | 103.11 | 3.66 |
| AD-58712.1 | 65.79 | 6.96 | 81.58 | 1.50 |
| AD-58713.1 | 84.14 | 26.41 | 101.56 | 5.60 |
| AD-58714.1 | 64.73 | 6.06 | 102.37 | 1.63 |
| AD-58715.1 | 91.05 | 18.67 | 101.08 | 11.00 |
| AD-58716.1 | 70.07 | 13.02 | 97.20 | 2.98 |
| AD-58717.1 | 11.27 | 6.91 | 66.56 | 4.32 |
| AD-58718.1 | 62.10 | 18.62 | 89.01 | 15.30 |
| AD-58719.1 | 72.94 | 18.26 | 91.58 | 9.97 |
| AD-58720.1 | 60.51 | 14.43 | 90.92 | 5.68 |
| AD-58721.1 | 17.72 | 7.70 | 56.72 | 2.57 |
| AD-58722.1 | 51.65 | 11.33 | 81.44 | 0.50 |
| AD-58723.1 | 53.27 | 21.60 | 94.25 | 16.20 |
| AD-58724.1 | 58.03 | 49.89 | 77.11 | 4.63 |
| AD-58725.1 | 54.58 | 40.10 | 76.12 | 1.59 |
| AD-58726.1 | 10.33 | 9.88 | 42.75 | 7.97 |
| AD-58727.1 | 62.80 | 26.45 | 83.23 | 13.10 |
| AD-58728.1 | 49.36 | 36.27 | 83.30 | 1.74 |
| AD-58729.1 | 43.83 | 61.99 | 73.54 | 19.33 |
| AD-58730.1 | 59.60 | 41.85 | 76.12 | 1.03 |
| AD-58731.1 | 85.29 | 24.78 | 128.06 | 32.14 |
| AD-58734.1 | 85.71 | 10.74 | 101.75 | 6.11 |
| AD-58737.1 | 79.87 | 10.59 | 114.89 | 7.46 |

### Example 3. In Vivo Single Dose Screen Using AD-59743

[0636] The ability of AD-59743 to suppress expression of TMPRSS6 protein was assessed by measuring levels of TMPRSS6 and hepcidin mRNA in the liver of wild-type C57BL/6 mice following administration of AD-59743. A single dose of 1, 3 or 10 mg/kg of AD-59743 was administered subcutaneously, and the mice were scarified on day 3 or day 7. Levels of TMPRSS6 and hepcidin mRNA in the liver were measured by qPCR using the methods described above. A control group received injections with PBS.

[0637] The levels of TMPRSS6 mRNA following administration of AD-59743 are shown in FIG. 1, and the levels of hepcidin mRNA following administration of AD-59743 are shown in FIG. 2. The results demonstrate a dose-dependent decrease in the levels of TMPRSS6 transcripts that is sustained through day 7.

### Example 4. In Vivo Effect of TMPRSS6 iRNA Agents in Combination with an Iron Chelator

[0638] The purpose of this study was to test the effect of co-administered TMPRSS6 specific siRNA and iron chelators on iron levels. In the study, 6-week old wild-type C57BL/6 and thalassemic Th3/+ mice (Douet et al., Am. J. Pathol. (2011), 178(2):774-83) were fed low-iron diets containing 3-5 ppm iron. The mice were administered intravenously the formulation AF-011-46273 containing deferiprone, an iron chelator at a dose of 250 mg/kg/day and an iRNA agent with the following structure: oligoSeq-sense-uGGuAuuuccuAGGGuAcAdTsdT (SEQ ID NO: 209); oligoSeq-antisense-UGuACCCuAGGAAAuACcAdTsdT (SEQ ID NO: 210). The formulation also contained MC-3/DSPC/Cholesterol/PEG-DMG 50/10/38.5/1.5. Liver and spleen tissues were collected and tissue nonheme iron concentrations were determined as described previously (see, e.g., Schmidt et al. (2013) Blood 121(7): 1200-8; Cook, J D, et al. Tissue iron stores. In: Cook J D, editor. Methods in Hematology. Vol 1. New York, NY: Churchill Livingstone Press; 1980. p. 104-109).

[0639] The results of these experiments demonstrate an additive effect of AD-46273 and deferiprone in Th3/+ mice, with the decreased iron levels relative to the negative controls.

### Example 5. Design, Specificity and Efficacy Prediction of Oligonucleotides

### Transcripts

[0640] siRNA design was carried out to identify siRNAs targeting human, cynomolgus monkey (Macaca fascicularis; henceforth “cyno”), mouse, and rat TMPRSS6 transcripts annotated in the NCBI Gene database (http://www.ncbi.nlm.nih.gov/gene/). Design used the following transcripts from the NCBI RefSeq collection: Human-NM_153609.2; Mouse-NM_027902.2; Rat-NM_001130556.1. For cyno, a transcript sequence was obtained via alignment with human TMPRSS6 of sequence assembled from two accessions: “ENSP00000384964 [mRNA] locus=chr10:82446450:82485403:−” and FR874253.1, available from the M. fascicularis genome project and NCBI Nucleotide databases, respectively (http://macaque.genomics.org.cn/page/species/download.jsp and http://www.ncbi.nlm.nih.gov/nucleotide/). Due to high primate/rodent sequence divergence, siRNA duplexes were designed in several separate batches, including but not limited to batches containing duplexes matching human and cyno transcripts only; human, cyno, and mouse transcripts only; and human, cyno, mouse, and rat transcripts only. Most siRNA duplexes were designed that shared 100% identity in the designated region with the listed human transcript and other species transcripts considered in each design batch (above). In some instances, mismatches between duplex and mRNA target were allowed at the first antisense (last sense) position when the antisense strand:target mRNA complementary basepair was a GC or CG pair. In these cases, duplexes were designed with UA or AU pairs at the first antisense:last sense pair. Thus the duplexes maintained complementarity but were mismatched with respect to target (U:C, U:G, A:C, or A:G).

[0641] The specificity of all possible 19mers was predicted from each sequence. Candidate 19mers that lacked repeats longer than 7 nucleotides were then selected. These 1128 candidate human/cyno, 69 human/cyno/mouse, and 23 human/cyno/mouse/rat siRNAs were used in comprehensive searches against the appropriate transcriptomes (defined as the set of NM_ and XM_records within the human, mouse, or rat NCBI Refseq sets, and the cyno transcriptome set in NCBI nucleotide) using an exhaustive “brute-force” algorithm implemented in the python script ‘BruteForce.py’. The script next parsed the transcript-oligo alignments to generate a score based on the position and number of mismatches between the siRNA and any potential ‘off-target’ transcript. The off-target score is weighted to emphasize differences in the ‘seed’ region of siRNAs, in positions 2-9 from the 5′ end of the molecule. Each oligo-transcript pair from the brute-force search was given a mismatch score by summing the individual mismatch scores; mismatches in the position 2-9 were counted as 2.8, mismatches in the cleavage site positions 10-11 were counted as 1.2, and mismatches in region 12-19 counted as 1.0. An additional off-target prediction was carried out by comparing the frequency of heptamers and octomers derived from 3 distinct, seed-derived hexamers of each oligo. The hexamers from positions 2-7 relative to the 5′ start were used to create 2 heptamers and one octomer. Heptamer1 was created by adding a 3′ A to the hexamer; heptamer2 was created by adding a 5′ A to the hexamer; the octomer was created by adding an A to both 5′ and 3′ ends of the hexamer. The frequency of octomers and heptamers in the human, cyno, mouse, or rat 3′UTRome (defined as the subsequence of the transcriptome from NCBI's Refseq database where the end of the coding region, the ‘CDS’, is clearly defined) was pre-calculated. The octomer frequency was normalized to the heptamer frequency using the median value from the range of octomer frequencies. A ‘mirSeedScore’ was then calculated by calculating the sum of ((3×normalized octomer count)+(2×heptamer2 count)+(1×heptamer1 count)).

[0642] Both siRNAs strands were assigned to a category of specificity according to the calculated scores: a score above 3 qualifies as highly specific, equal to 3 as specific and between 2 and 2.8 as moderately specific. We sorted by the specificity of the antisense strand. We then selected moderately (or higher) specific duplexes whose antisense oligos possessed characteristics of duplexes with high predicted efficacy, including maximal UA content in the seed region and low overall GC content.

[0643] For GalNaC-conjugated duplexes, sense 21mer and antisense 23mer oligos were designed by extending antisense 19mers (described above) to 23 nucleotides of target-complementary sequence. All species transcripts included in the design batch were checked for complementarity. For each duplex, the sense 21mer was specified as the reverse complement of the first 21 nucleotides of the antisense strand.

siRNA Sequence Selection

[0644] A total of 5 sense and 5 antisense human, 32 sense and 32 antisense derived human/cyno, 4 sense and 4 antisense derived human/cyno/mouse, 8 sense and 8 antisense derived human/cyno/mouse/rat, 19 sense and 19 antisense derived human/cyno/rat, 2 sense and 2 antisense derived human/mouse, and 1 sense and 1 antisense derived human/mouse/rat siRNA 21/23mer oligos were synthesized and formed into GalNAc-conjugated duplexes.

[0645] The sequences of the sense and antisense strands of the unmodified duplexes are shown in Table 4, and the sequences of the sense and antisense strands of the modified duplexes are shown in Table 5.

TABLE 4
TMPRSS6-unmodified seqeunces

| | Sense | | SEQ | Antisense | | SEQ | Position |
|---|---|---|---|---|---|---|---|
| | sequence | | ID | sequence | | ID | in NM_ |
| Duplex ID | ID | Sense sequence | NO: | ID | Antisense sequence | NO: | 153609.2 |
| AD-60944.1 | A-122732.1 | GGUGCUACUCUGGUAUUUCCU | 211 | A-122733.1 | AGGAAAUACCAGAGUAGCACCCC | 280 | 318 |
| AD-59743.1 | A-120243.1 | UCUGGUAUUUCCUAGGGUACA | 212 | A-120244.1 | UGUACCCUAGGAAAUACCAGAGU | 281 | 326 |
| AD-60940.1 | A-122745.1 | CUGGUAUUUCCUAGGGUACAA | 213 | A-122746.1 | UUGUACCCUAGGAAAUACCAGAG | 282 | 327 |
| AD-61002.2 | A-122838.1 | UGGUAUUUCCUAGGGUACAAA | 214 | A-122839.1 | UUUGUACCCUAGGAAAUACCAGA | 283 | 328 |
| AD-61000.1 | A-122852.1 | GGUAUUUCCUAGGGUACAAGA | 215 | A-122853.1 | UCUUGUACCCUAGGAAAUACCAG | 284 | 329 |
| AD-46273.1 | A-96908.1 | UGGUAUUUCCUAGGGUACA | 216 | A-96909.1 | UGUACCCUAGGAAAUACCA | 285 | 330 |
| AD-61003.1 | A-122854.1 | GUAUUUCCUAGGGUACAAGGA | 217 | A-122855.1 | UCCUUGUACCCUAGGAAAUACCA | 286 | 330 |
| AD-60994.1 | A-122848.1 | AUUUCCUAGGGUACAAGGCGA | 218 | A-122849.1 | UCGCCUUGUACCCUAGGAAAUAC | 287 | 332 |
| AD-60990.1 | A-122830.1 | UUUCCUAGGGUACAAGGCGGA | 219 | A-122831.1 | UCCGCCUUGUACCCUAGGAAAUA | 288 | 333 |
| AD-60956.1 | A-122736.1 | CGCCACUUCUCCCAGGAUCUU | 220 | A-122737.1 | AAGAUCCUGGGAGAAGUGGCGAU | 289 | 400 |
| AD-60981.1 | A-122757.1 | GCCACUUCUCCCAGGAUCUUA | 221 | A-122758.1 | UAAGAUCCUGGGAGAAGUGGCGA | 290 | 401 |
| AD-60953.1 | A-122775.1 | CUGCUUCUUCUGGUUCAUUCU | 222 | A-122776.1 | AGAAUGAACCAGAAGAAGCAGGU | 291 | 558 |
| AD-60977.1 | A-122783.1 | CUUCUUCUGGUUCAUUCUCCA | 223 | A-122784.1 | UGGAGAAUGAACCAGAAGAAGCA | 292 | 561 |
| AD-60964.1 | A-119169.2 | CCCUACAGGGCCGAGUACGAA | 224 | A-122764.1 | UUCGUACUCGGCCCUGUAGGGGA | 293 | 679 |
| AD-60947.1 | A-122773.1 | CUACAGGGCCGAGUACGAAGU | 225 | A-122774.1 | ACUUCGUACUCGGCCCUGUAGGG | 294 | 681 |
| AD-60957.1 | A-122751.1 | GCCAGUGUGAAAGACAUAGCU | 226 | A-122752.1 | AGCUAUGUCUUUCACACUGGCUU | 295 | 730 |
| AD-60960.1 | A-122792.1 | AGUGUGAAAGACAUAGCUGCA | 227 | A-122793.1 | UGCAGCUAUGUCUUUCACACUGG | 296 | 733 |
| AD-60972.1 | A-122796.1 | CACGCUGGGUUGUUACCGCUA | 228 | A-122797.1 | UAGCGGUAACAACCCAGCGUGGA | 297 | 762 |
| AD-60970.1 | A-122765.1 | GGGUUGUUACCGCUACAGCUA | 229 | A-122766.1 | UAGCUGUAGCGGUAACAACCCAG | 298 | 768 |
| AD-60963.1 | A-122753.1 | CGGGACCGACUGGCCAUGUAU | 230 | A-122754.1 | AUACAUGGCCAGUCGGUCCCGGC | 299 | 916 |
| AD-60968.1 | A-122739.1 | CCGACUGGCCAUGUAUGACGU | 231 | A-122740.1 | ACGUCAUACAUGGCCAGUCGGUC | 300 | 921 |
| AD-60942.1 | A-122786.1 | GGGCCUGCACAGCUACUACGA | 232 | A-122787.1 | UCGUAGUAGCUGUGCAGGCCCUU | 301 | 1053 |
| AD-60951.1 | A-122749.1 | GGCAGAAGUAUGAUUUGCCGU | 233 | A-122750.1 | ACGGCAAAUCAUACUUCUGCCUC | 302 | 1280 |
| AD-60984.1 | A-122800.1 | CCAGAACAGGAGGCUGUGUGG | 234 | A-122801.1 | CCACACAGCCUCCUGUUCUGGAU | 303 | 1323 |
| AD-60955.1 | A-122806.1 | CAGAACAGGAGGCUGUGUGGC | 235 | A-122807.1 | GCCACACAGCCUCCUGUUCUGGA | 304 | 1324 |
| AD-60943.1 | A-122802.1 | CACCUCCCAGAUCUCCCUCAC | 236 | A-122803.1 | GUGAGGGAGAUCUGGGAGGUGAA | 305 | 1413 |
| AD-61001.1 | A-122823.1 | CACCUCCCAGAUCUCCCUCAA | 237 | A-122824.1 | UUGAGGGAGAUCUGGGAGGUGAA | 306 | 1413 |
| AD-60974.1 | A-122741.1 | UGUGCGGGUGCACUAUGGCUU | 238 | A-122742.1 | AAGCCAUAGUGCACCCGCACACC | 307 | 1443 |
| AD-60982.1 | A-122769.1 | GCGGGUGCACUAUGGCUUGUA | 239 | A-122770.1 | UACAAGCCAUAGUGCACCCGCAC | 308 | 1446 |
| AD-60996.1 | A-122834.1 | CCCCUGCCCUGGAGAGUUCCU | 240 | A-122835.1 | AGGAACUCUCCAGGGCAGGGGUC | 309 | 1479 |
| AD-60997.1 | A-122850.1 | CCCUGCCCUGGAGAGUUCCUA | 241 | A-122851.1 | UAGGAACUCUCCAGGGCAGGGGU | 310 | 1480 |
| AD-61006.1 | A-122856.1 | CCUGCCCUGGAGAGUUCCUCU | 242 | A-122857.1 | AGAGGAACUCUCCAGGGCAGGGG | 311 | 1481 |
| AD-60988.1 | A-122844.1 | CUGCCCUGGAGAGUUCCUCUA | 243 | A-122845.1 | UAGAGGAACUCUCCAGGGCAGGG | 312 | 1482 |
| AD-60959.1 | A-122777.1 | CCUGUGAUGGGGUCAAGGACU | 244 | A-122778.1 | AGUCCUUGACCCCAUCACAGGCA | 313 | 1529 |
| AD-60999.1 | A-122836.1 | GGACUGCCCCAACGGCCUGGA | 245 | A-122837.1 | UCCAGGCCGUUGGGGCAGUCCUU | 314 | 1545 |
| AD-60991.1 | A-122846.1 | ACUGCCCCAACGGCCUGGAUA | 246 | A-122847.1 | UAUCCAGGCCGUUGGGGCAGUCC | 315 | 1547 |
| AD-60993.1 | A-122832.1 | CUGCCCCAACGGCCUGGAUGA | 247 | A-122833.1 | UCAUCCAGGCCGUUGGGGCAGUC | 316 | 1548 |
| AD-61005.1 | A-122840.1 | UGCCCCAACGGCCUGGAUGAA | 248 | A-122841.1 | UUCAUCCAGGCCGUUGGGGCAGU | 317 | 1549 |
| AD-60987.1 | A-119213.2 | GCCCCAACGGCCUGGAUGAGA | 249 | A-122829.1 | UCUCAUCCAGGCCGUUGGGGCAG | 318 | 1550 |
| AD-60986.1 | A-122842.1 | CCCCAACGGCCUGGAUGAGAA | 250 | A-122843.1 | UUCUCAUCCAGGCCGUUGGGGCA | 319 | 1551 |
| AD-60952.1 | A-119187.2 | CCCAACGGCCUGGAUGAGAGA | 251 | A-122761.1 | UCUCUCAUCCAGGCCGUUGGGGC | 320 | 1552 |
| AD-60983.1 | A-119191.2 | CAACGGCCUGGAUGAGAGAAA | 252 | A-122785.1 | UUUCUCUCAUCCAGGCCGUUGGG | 321 | 1554 |
| AD-60950.1 | A-122734.1 | ACGGCCUGGAUGAGAGAAACU | 253 | A-122735.1 | AGUUUCUCUCAUCCAGGCCGUUG | 322 | 1556 |
| AD-60980.1 | A-122743.1 | CCUGGAUGAGAGAAACUGCGU | 254 | A-122744.1 | ACGCAGUUUCUCUCAUCCAGGCC | 323 | 1560 |
| AD-60998.1 | A-122821.1 | CACUGUGACUGUGGCCUCCAA | 255 | A-122822.1 | UUGGAGGCCACAGUCACAGUGCU | 324 | 1804 |
| AD-60961.1 | A-122808.1 | GUCCUCCGAGGGUGAGUGGCC | 256 | A-122809.1 | GGCCACUCACCCUCGGAGGACAC | 325 | 1857 |
| AD-61004.1 | A-122825.1 | CUCCGAGGGUGAGUGGCCAUA | 257 | A-122826.1 | UAUGGCCACUCACCCUCGGAGGA | 326 | 1860 |
| AD-60949.1 | A-122804.1 | UCCGAGGGUGAGUGGCCAUGG | 258 | A-122805.1 | CCAUGGCCACUCACCCUCGGAGG | 327 | 1861 |
| AD-60969.1 | A-119189.2 | CCAGGUUCGGGGUCGACACAU | 259 | A-122755.1 | AUGUGUCGACCCCGAACCUGGAG | 328 | 1893 |
| AD-60966.1 | A-122794.1 | AGGUUCGGGGUCGACACAUCU | 260 | A-122795.1 | AGAUGUGUCGACCCCGAACCUGG | 329 | 1895 |
| AD-60967.1 | A-122810.1 | CGGGGUCGACACAUCUGUGGG | 261 | A-122811.1 | CCCACAGAUGUGUCGACCCCGAA | 330 | 1900 |
| AD-60989.1 | A-122816.1 | CGGGGUCGACACAUCUGUGGA | 262 | A-122817.1 | UCCACAGAUGUGUCGACCCCGAA | 331 | 1900 |
| AD-60973.1 | A-122812.1 | GGGGUCGACACAUCUGUGGGG | 263 | A-122813.1 | CCCCACAGAUGUGUCGACCCCGA | 332 | 1901 |
| AD-60992.1 | A-122818.1 | GGGGUCGACACAUCUGUGGGA | 264 | A-122819.1 | UCCCACAGAUGUGUCGACCCCGA | 333 | 1901 |
| AD-60985.1 | A-122827.1 | GGGUCGACACAUCUGUGGGGA | 265 | A-122828.1 | UCCCCACAGAUGUGUCGACCCCG | 334 | 1902 |
| AD-60946.1 | A-122759.1 | GCUGACCGCUGGGUGAUAACA | 266 | A-122760.1 | UGUUAUCACCCAGCGGUCAGCGA | 335 | 1933 |
| AD-60979.1 | A-122814.1 | CUUCCAGGAGGACAGCAUGGC | 267 | A-122815.1 | GCCAUGCUGUCCUCCUGGAAGCA | 336 | 1965 |
| AD-60976.1 | A-122767.1 | GGCCUGGAGAGGUGUCCUUCA | 268 | A-122768.1 | UGAAGGACACCUCUCCAGGCCAG | 337 | 2039 |
| AD-60939.1 | A-122730.1 | GCCUGGAGAGGUGUCCUUCAA | 269 | A-122731.1 | UUGAAGGACACCUCUCCAGGCCA | 338 | 2040 |
| AD-60978.1 | A-122798.1 | CCAAGCAGGGGGACAAGUAUU | 270 | A-122799.1 | AAUACUUGUCCCCCUGCUUGGCA | 339 | 2608 |
| AD-60958.1 | A-122762.1 | CAAGCAGGGGGACAAGUAUUC | 271 | A-122763.1 | GAAUACUUGUCCCCCUGCUUGGC | 340 | 2609 |
| AD-60962.1 | A-119231.2 | UGGCAGGAGGUGGCAUCUUGU | 272 | A-122738.1 | ACAAGAUGCCACCUCCUGCCACC | 341 | 2664 |
| AD-60941.1 | A-122771.1 | GCAGGAGGUGGCAUCUUGUCU | 273 | A-122772.1 | AGACAAGAUGCCACCUCCUGCCA | 342 | 2666 |
| AD-60965.1 | A-122779.1 | GCUUCGGAAGCCCCUGGUCUA | 274 | A-122780.1 | UAGACCAGGGGCUUCCGAAGCUG | 343 | 2954 |
| AD-60954.1 | A-122790.1 | CUUCGGAAGCCCCUGGUCUAA | 275 | A-122791.1 | UUAGACCAGGGGCUUCCGAAGCU | 344 | 2955 |
| AD-60975.1 | A-119233.2 | CCCCUGGUCUAACUUGGGAUC | 276 | A-122756.1 | GAUCCCAAGUUAGACCAGGGGCU | 345 | 2964 |
| AD-60945.1 | A-122747.1 | CCCUGGUCUAACUUGGGAUCU | 277 | A-122748.1 | AGAUCCCAAGUUAGACCAGGGGC | 346 | 2965 |
| AD-60971.1 | A-122781.1 | CCUGGUCUAACUUGGGAUCUG | 278 | A-122782.1 | CAGAUCCCAAGUUAGACCAGGGG | 347 | 2966 |
| AD-60948.1 | A-122788.1 | CUAACUUGGGAUCUGGGAAUG | 279 | A-122789.1 | CAUUCCCAGAUCCCAAGUUAGAC | 348 | 2972 |

TABLE 5
TMPRSS6 modified sequences

| | | | SEQ | | | SEQ |
|---|---|---|---|---|---|---|
| Duplex | Sense | | ID | Antisense | | ID |
| ID | sequence ID | Sense sequence | NO: | sequence ID | Antisense sequence | NO: |
| AD-46273.1 | A-96908.1 | uGGuAuuuccuAGGGuAcAdTsdT | 349 | A-96909.1 | UGuACCCuAGGAAAuACcAdTsdT | 418 |
| AD-59743.1 | A-120243.1 | UfscsUfgGfuAfuUfUfCfcUfaGfgGfuAfcAfL96 | 350 | A-120244.1 | usGfsuAfcCfcUfaGfgaaAfuAfcCfaGfasgsu | 419 |
| AD-60939.1 | A-122730.1 | GfscsCfuGfgAfgAfGfGfuGfuCfcUfuCfaAfL96 | 351 | A-122731.1 | usUfsgAfaGfgAfcAfccuCfuCfcAfgGfcscsa | 420 |
| AD-60940.1 | A-122745.1 | CfsusGfgUfaUfuUfCfCfuAfgGfgUfaCfaAfL96 | 352 | A-122746.1 | usUfsgUfaCfcCfuAfggaAfaUfaCfcAfgsasg | 421 |
| AD-60941.1 | A-122771.1 | GfscsAfgGfaGfgUfGfGfcAfuCfuUfgUfcUfL96 | 353 | A-122772.1 | asGfsaCfaAfgAfuGfccaCfcUfcCfuGfcscsa | 422 |
| AD-60942.1 | A-122786.1 | GfsgsGfcCfuGfcAfCfAfgCfuAfcUfaCfgAfL96 | 354 | A-122787.1 | usCfsgUfaGfuAfgCfuguGfcAfgGfcCfcsusu | 423 |
| AD-60943.1 | A-122802.1 | CfsasCfcUfcCfcAfGfAfuCfuCfcCfuCfaCfL96 | 355 | A-122803.1 | gsUfsgAfgGfgAfgAfucuGfgGfaGfgUfgsasa | 424 |
| AD-60944.1 | A-122732.1 | GfsgsUfgCfuAfcUfCfUfgGfuAfuUfuCfcUfL96 | 356 | A-122733.1 | asGfsgAfaAfuAfcCfagaGfuAfgCfaCfcscsc | 425 |
| AD-60945.1 | A-122747.1 | CfscsCfuGfgUfcUfAfAfcUfuGfgGfaUfcUfL96 | 357 | A-122748.1 | asGfsaUfcCfcAfaGfuuaGfaCfcAfgGfgsgsc | 426 |
| AD-60946.1 | A-122759.1 | GfscsUfgAfcCfgCfUfGfgGfuGfaUfaAfcAfL96 | 358 | A-122760.1 | usGfsuUfaUfcAfcCfcagCfgGfuCfaGfcsgsa | 427 |
| AD-60947.1 | A-122773.1 | CfsusAfcAfgGfgCfCfGfaGfuAfcGfaAfgUfL96 | 359 | A-122774.1 | asCfsuUfcGfuAfcUfcggCfcCfuGfuAfgsgsg | 428 |
| AD-60948.1 | A-122788.1 | CfsusAfaCfuUfgGfGfAfuCfuGfgGfaAfuGfL96 | 360 | A-122789.1 | csAfsuUfcCfcAfgAfuccCfaAfgUfuAfgsasc | 429 |
| AD-60949.1 | A-122804.1 | UfscsCfgAfgGfgUfGfAfgUfgGfcCfaUfgGfL96 | 361 | A-122805.1 | csCfsaUfgGfcCfaCfucaCfcCfuCfgGfasgsg | 430 |
| AD-60950.1 | A-122734.1 | AfscsGfgCfcUfgGfAfUfgAfgAfgAfaAfcUfL96 | 362 | A-122735.1 | asGfsuUfuCfuCfuCfaucCfaGfgCfcGfususg | 431 |
| AD-60951.1 | A-122749.1 | GfsgsCfaGfaAfgUfAfUfgAfuUfuGfcCfgUfL96 | 363 | A-122750.1 | asCfsgGfcAfaAfuCfauaCfuUfcUfgCfcsusc | 432 |
| AD-60952.1 | A-119187.2 | CfscsCfaAfcGfgCfCfUfgGfaUfgAfgAfgAfL96 | 364 | A-122761.1 | usCfsuCfuCfaUfcCfaggCfcGfuUfgGfgsgsc | 433 |
| AD-60953.1 | A-122775.1 | CfsusGfcUfuCfuUfCfUfgGfuUfcAfuUfcUfL96 | 365 | A-122776.1 | asGfsaAfuGfaAfcCfagaAfgAfaGfcAfgsgsu | 434 |
| AD-60954.1 | A-122790.1 | CfsusUfcGfgAfaGfCfCfcCfuGfgUfcUfaAfL96 | 366 | A-122791.1 | usUfsaGfaCfcAfgGfggcUfuCfcGfaAfgscsu | 435 |
| AD-60955.1 | A-122806.1 | CfsasGfaAfcAfgGfAfGfgCfuGfuGfuGfgCfL96 | 367 | A-122807.1 | gsCfscAfcAfcAfgCfcucCfuGfuUfcUfgsgsa | 436 |
| AD-60956.1 | A-122736.1 | CfsgsCfcAfcUfuCfUfCfcCfaGfgAfuCfuUfL96 | 368 | A-122737.1 | asAfsgAfuCfcUfgGfgagAfaGfuGfgCfgsasu | 437 |
| AD-60957.1 | A-122751.1 | GfscsCfaGfuGfuGfAfAfaGfaCfaUfaGfcUfL96 | 369 | A-122752.1 | asGfscUfaUfgUfcUfuucAfcAfcUfgGfcsusu | 438 |
| AD-60958.1 | A-122762.1 | CfsasAfgCfaGfgGfGfGfaCfaAfgUfaUfuCfL96 | 370 | A-122763.1 | gsAfsaUfaCfuUfgUfcccCfcUfgCfuUfgsgsc | 439 |
| AD-60959.1 | A-122777.1 | CfscsUfgUfgAfuGfGfGfgUfcAfaGfgAfcUfL96 | 371 | A-122778.1 | asGfsuCfcUfuGfaCfcccAfuCfaCfaGfgscsa | 440 |
| AD-60960.1 | A-122792.1 | AfsgsUfgUfgAfaAfGfAfcAfuAfgCfuGfcAfL96 | 372 | A-122793.1 | usGfscAfgCfuAfuGfucuUfuCfaCfaCfusgsg | 441 |
| AD-60961.1 | A-122808.1 | GfsusCfcUfcCfgAfGfGfgUfgAfgUfgGfcCfL96 | 373 | A-122809.1 | gsGfscCfaCfuCfaCfccuCfgGfaGfgAfcsasc | 442 |
| AD-60962.1 | A-119231.2 | UfsgsGfcAfgGfaGfGfUfgGfcAfuCfuUfgUfL96 | 374 | A-122738.1 | asCfsaAfgAfuGfcCfaccUfcCfuGfcCfascsc | 443 |
| AD-60963.1 | A-122753.1 | CfsgsGfgAfcCfgAfCfUfgGfcCfaUfgUfaUfL96 | 375 | A-122754.1 | asUfsaCfaUfgGfcCfaguCfgGfuCfcCfgsgsc | 444 |
| AD-60964.1 | A-119169.2 | CfscsCfuAfcAfgGfGfCfcGfaGfuAfcGfaAfL96 | 376 | A-122764.1 | usUfscGfuAfcUfcGfgccCfuGfuAfgGfgsgsa | 445 |
| AD-60965.1 | A-122779.1 | GfscsUfuCfgGfaAfGfCfcCfcUfgGfuCfuAfL96 | 377 | A-122780.1 | usAfsgAfcCfaGfgGfgcuUfcCfgAfaGfcsusg | 446 |
| AD-60966.1 | A-122794.1 | AfsgsGfuUfcGfgGfGfUfcGfaCfaCfaUfcUfL96 | 378 | A-122795.1 | asGfsaUfgUfgUfcGfaccCfcGfaAfcCfusgsg | 447 |
| AD-60967.1 | A-122810.1 | CfsgsGfgGfuCfgAfCfAfcAfuCfuGfuGfgGfL96 | 379 | A-122811.1 | csCfscAfcAfgAfuGfuguCfgAfcCfcCfgsasa | 448 |
| AD-60968.1 | A-122739.1 | CfscsGfaCfuGfgCfCfAfuGfuAfuGfaCfgUfL96 | 380 | A-122740.1 | asCfsgUfcAfuAfcAfuggCfcAfgUfcGfgsusc | 449 |
| AD-60969.1 | A-119189.2 | CfscsAfgGfuUfcGfGfGfgUfcGfaCfaCfaUfL96 | 381 | A-122755.1 | asUfsgUfgUfcGfaCfcccGfaAfcCfuGfgsasg | 450 |
| AD-60970.1 | A-122765.1 | GfsgsGfuUfgUfuAfCfCfgCfuAfcAfgCfuAfL96 | 382 | A-122766.1 | usAfsgCfuGfuAfgCfgguAfaCfaAfcCfcsasg | 451 |
| AD-60971.1 | A-122781.1 | CfscsUfgGfuCfuAfAfCfuUfgGfgAfuCfuGfL96 | 383 | A-122782.1 | csAfsgAfuCfcCfaAfguuAfgAfcCfaGfgsgsg | 452 |
| AD-60972.1 | A-122796.1 | CfsasCfgCfuGfgGfUfUfgUfuAfcCfgCfuAfL96 | 384 | A-122797.1 | usAfsgCfgGfuAfaCfaacCfcAfgCfgUfgsgsa | 453 |
| AD-60973.1 | A-122812.1 | GfsgsGfgUfcGfaCfAfCfaUfcUfgUfgGfgGfL96 | 385 | A-122813.1 | csCfscCfaCfaGfaUfgugUfcGfaCfcCfcsgsa | 454 |
| AD-60974.1 | A-122741.1 | UfsgsUfgCfgGfgUfGfCfaCfuAfuGfgCfuUfL96 | 386 | A-122742.1 | asAfsgCfcAfuAfgUfgcaCfcCfgCfaCfascsc | 455 |
| AD-60975.1 | A-119233.2 | CfscsCfcUfgGfuCfUfAfaCfuUfgGfgAfuCfL96 | 387 | A-122756.1 | gsAfsuCfcCfaAfgUfuagAfcCfaGfgGfgscsu | 456 |
| AD-60976.1 | A-122767.1 | GfsgsCfcUfgGfaGfAfGfgUfgUfcCfuUfcAfL96 | 388 | A-122768.1 | usGfsaAfgGfaCfaCfcucUfcCfaGfgCfcsasg | 457 |
| AD-60977.1 | A-122783.1 | CfsusUfcUfuCfuGfGfUfuCfaUfuCfuCfcAfL96 | 389 | A-122784.1 | usGfsgAfgAfaUfgAfaccAfgAfaGfaAfgscsa | 458 |
| AD-60978.1 | A-122798.1 | CfscsAfaGfcAfgGfGfGfgAfcAfaGfuAfuUfL96 | 390 | A-122799.1 | asAfsuAfcUfuGfuCfcccCfuGfcUfuGfgscsa | 459 |
| AD-60979.1 | A-122814.1 | CfsusUfcCfaGfgAfGfGfaCfaGfcAfuGfgCfL96 | 391 | A-122815.1 | gsCfscAfuGfcUfgUfccuCfcUfgGfaAfgscsa | 460 |
| AD-60980.1 | A-122743.1 | CfscsUfgGfaUfgAfGfAfgAfaAfcUfgCfgUfL96 | 392 | A-122744.1 | asCfsgCfaGfuUfuCfucuCfaUfcCfaGfgscsc | 461 |
| AD-60981.1 | A-122757.1 | GfscsCfaCfuUfcUfCfCfcAfgGfaUfcUfuAfL96 | 393 | A-122758.1 | usAfsaGfaUfcCfuGfggaGfaAfgUfgGfcsgsa | 462 |
| AD-60982.1 | A-122769.1 | GfscsGfgGfuGfcAfCfUfaUfgGfcUfuGfuAfL96 | 394 | A-122770.1 | usAfscAfaGfcCfaUfaguGfcAfcCfcGfcsasc | 463 |
| AD-60983.1 | A-119191.2 | CfsasAfcGfgCfcUfGfGfaUfgAfgAfgAfaAfL96 | 395 | A-122785.1 | usUfsuCfuCfuCfaUfccaGfgCfcGfuUfgsgsg | 464 |
| AD-60984.1 | A-122800.1 | CfscsAfgAfaCfaGfGfAfgGfcUfgUfgUfgGfL96 | 396 | A-122801.1 | csCfsaCfaCfaGfcCfuccUfgUfuCfuGfgsasu | 465 |
| AD-60985.1 | A-122827.1 | GfsgsGfuCfgAfcAfCfAfuCfuGfuGfgGfgAfL96 | 397 | A-122828.1 | usCfscCfcAfcAfgAfuguGfuCfgAfcCfcscsg | 466 |
| AD-60986.1 | A-122842.1 | CfscsCfcAfaCfgGfCfCfuGfgAfuGfaGfaAfL96 | 398 | A-122843.1 | usUfscUfcAfuCfcAfggcCfgUfuGfgGfgscsa | 467 |
| AD-60987.1 | A-119213.2 | GfscsCfcCfaAfcGfGfCfcUfgGfaUfgAfgAfL96 | 399 | A-122829.1 | usCfsuCfaUfcCfaGfgccGfuUfgGfgGfcsasg | 468 |
| AD-60988.1 | A-122844.1 | CfsusGfcCfcUfgGfAfGfaGfuUfcCfuCfuAfL96 | 400 | A-122845.1 | usAfsgAfgGfaAfcUfcucCfaGfgGfcAfgsgsg | 469 |
| AD-60989.1 | A-122816.1 | CfsgsGfgGfuCfgAfCfAfcAfuCfuGfuGfgAfL96 | 401 | A-122817.1 | usCfscAfcAfgAfuGfuguCfgAfcCfcCfgsasa | 470 |
| AD-60990.1 | A-122830.1 | UfsusUfcCfuAfgGfGfUfaCfaAfgGfcGfgAfL96 | 402 | A-122831.1 | usCfscGfcCfuUfgUfaccCfuAfgGfaAfasusa | 471 |
| AD-60991.1 | A-122846.1 | AfscsUfgCfcCfcAfAfCfgGfcCfuGfgAfuAfL96 | 403 | A-122847.1 | usAfsuCfcAfgGfcCfguuGfgGfgCfaGfuscsc | 472 |
| AD-60992.1 | A-122818.1 | GfsgsGfgUfcGfaCfAfCfaUfcUfgUfgGfgAfL96 | 404 | A-122819.1 | usCfscCfaCfaGfaUfgugUfcGfaCfcCfcsgsa | 473 |
| AD-60993.1 | A-122832.1 | CfsusGfcCfcCfaAfCfGfgCfcUfgGfaUfgAfL96 | 405 | A-122833.1 | usCfsaUfcCfaGfgCfcguUfgGfgGfcAfgsusc | 474 |
| AD-60994.1 | A-122848.1 | AfsusUfuCfcUfaGfGfGfuAfcAfaGfgCfgAfL96 | 406 | A-122849.1 | usCfsgCfcUfuGfuAfcccUfaGfgAfaAfusasc | 475 |
| AD-60996.1 | A-122834.1 | CfscsCfcUfgCfcCfUfGfgAfgAfgUfuCfcUfL96 | 407 | A-122835.1 | asGfsgAfaCfuCfuCfcagGfgCfaGfgGfgsusc | 476 |
| AD-60997.1 | A-122850.1 | CfscsCfuGfcCfcUfGfGfaGfaGfuUfcCfuAfL96 | 408 | A-122851.1 | usAfsgGfaAfcUfcUfccaGfgGfcAfgGfgsgsu | 477 |
| AD-60998.1 | A-122821.1 | CfsasCfuGfuGfaCfUfGfuGfgCfcUfcCfaAfL96 | 409 | A-122822.1 | usUfsgGfaGfgCfcAfcagUfcAfcAfgUfgscsu | 478 |
| AD-60999.1 | A-122836.1 | GfsgsAfcUfgCfcCfCfAfaCfgGfcCfuGfgAfL96 | 410 | A-122837.1 | usCfscAfgGfcCfgUfuggGfgCfaGfuCfcsusu | 479 |
| AD-61000.1 | A-122852.1 | GfsgsUfaUfuUfcCfUfAfgGfgUfaCfaAfgAfL96 | 411 | A-122853.1 | usCfsuUfgUfaCfcCfuagGfaAfaUfaCfcsasg | 480 |
| AD-61001.1 | A-122823.1 | CfsasCfcUfcCfcAfGfAfuCfuCfcCfuCfaAfL96 | 412 | A-122824.1 | usUfsgAfgGfgAfgAfucuGfgGfaGfgUfgsasa | 481 |
| AD-61002.1 | A-122838.1 | UfsgsGfuAfuUfuCfCfUfaGfgGfuAfcAfaAfL96 | 413 | A-122839.1 | usUfsuGfuAfcCfcUfaggAfaAfuAfcCfasgsa | 482 |
| AD-61003.1 | A-122854.1 | GfsusAfuUfuCfcUfAfGfgGfuAfcAfaGfgAfL96 | 414 | A-122855.1 | usCfscUfuGfuAfcCfcuaGfgAfaAfuAfcscsa | 483 |
| AD-61004.1 | A-122825.1 | CfsusCfcGfaGfgGfUfGfaGfuGfgCfcAfuAfL96 | 415 | A-122826.1 | usAfsuGfgCfcAfcUfcacCfcUfcGfgAfgsgsa | 484 |
| AD-61005.1 | A-122840.1 | UfsgsCfcCfcAfaCfGfGfcCfuGfgAfuGfaAfL96 | 416 | A-122841.1 | usUfscAfuCfcAfgGfccgUfuGfgGfgCfasgsu | 485 |
| AD-61006.1 | A-122856.1 | CfscsUfgCfcCfuGfGfAfgAfgUfuCfcUfcUfL96 | 417 | A-122857.1 | asGfsaGfgAfaCfuCfuccAfgGfgCfaGfgsgsg | 486 |

### Example 6. In Vitro Single Dose Screen

### Cell Culture and Transfections for Single Dose and Dose Response Studies

[0646] Hep3B cells (ATCC, Manassas, VA) were grown to near confluence at 37° C. in an atmosphere of 5% CO₂ in DMEM (ATCC) supplemented with 10% FBS, streptomycin, and glutamine (ATCC) before being released from the plate by trypsinization. Transfection was carried out by adding 14.8 μl of Opti-MEM plus 0.2 μl of Lipofectamine RNAiMax per well (Invitrogen, Carlsbad CA. cat #13778-150) to 5 μl of siRNA duplexes per well into a 96-well plate and incubated at room temperature for 15 minutes. 80 μl of complete growth media without antibiotic containing ˜2×10⁴ Hep3B cells were then added to the siRNA mixture. Cells were incubated for 24 hours prior to RNA purification. Experiments were performed at 10 nM and 0.1 nM final duplex concentration.

Total RNA Isolation Using DYNABEADS mRNA Isolation Kit (Invitrogen, Part #: 610-12)

[0647] Cells were harvested and lysed in 150 μl of Lysis/Binding Buffer then mixed for 5 minutes at 850 rpm using an Eppendorf Thermomixer (the mixing speed was the same throughout the process). Ten microliters of magnetic beads and 80 μl Lysis/Binding Buffer mixture were added to a round bottom plate and mixed for 1 minute. Magnetic beads were captured using magnetic stand and the supernatant was removed without disturbing the beads. After removing supernatant, the lysed cells were added to the remaining beads and mixed for 5 minutes. After removing supernatant, magnetic beads were washed 2 times with 150 μl Wash Buffer A and mixed for 1 minute. Beads were capture again and supernatant removed. Beads were then washed with 150 μl Wash Buffer B, captured and supernatant was removed. Beads were next washed with 150 μl Elution Buffer, captured and supernatant removed. Beads were allowed to dry for 2 minutes. After drying, 50 μl of Elution Buffer was added and mixed for 5 minutes at 70° C. Beads were captured on magnet for 5 minutes. 40 μl of supernatant was removed and added to another 96 well plate.

cDNA Synthesis Using ABI High Capacity cDNA Reverse Transcription Kit (Applied Biosystems, Foster City, CA, Cat #4368813)

[0648] A master mix of 2 μl 10× Buffer, 0.8 μl 25×dNTPs, 2 μl Random primers, 1 μl Reverse Transcriptase, 1 μl RNase inhibitor and 3.2 μl of H₂O per reaction were added into 10 μl total RNA. cDNA was generated using a Bio-Rad C-1000 or S-1000 thermal cycler (Hercules, CA) through the following steps: 25° C. 10 min, 37° C. 120 min, 85° C. 5 sec, 4° C. hold.

### Real Time PCR

[0649] 2 μl of cDNA were added to a master mix containing 0.5 μl GAPDH TaqMan Probe (Applied Biosystems Cat #4326317E), 0.5 μl TMPRSS6 TaqMan probe (Applied Biosystems cat #Hs00542184_m1) and 5 μl Lightcycler 480 probe master mix (Roche Cat #04887301001) per well in a 384 well 50 plates (Roche cat #04887301001). Real time PCR was done in an Roche Lightcycler Real Time PCR system (Roche) using the ΔΔCt(RQ) assay. Each duplex was tested in two independent transfections and each transfection was assayed in duplicate, unless otherwise noted in the summary tables.

[0650] To calculate relative fold change, real time data were analyzed using the ΔΔCt method and normalized to assays performed with cells transfected with 10 nM AD-1955, or mock transfected cells.

[0651] Data are expressed as a fraction of TMPRSS6 message remaining in cells transfected with siRNAs targeting TMPRSS6, relative to naïve cells. All siRNAs were transfected at least two times and qPCR reactions were performed in duplicate. Data are show in Table 6.

TABLE 6
TMPRSS6 single dose screen.

| Duplex ID | Avg 10 nM | Avg 0.1 nM | SD 10 nM | SD 0.1 nM |
|---|---|---|---|---|
| AD-46273 | 76.5 | 112.1 | 14.3 | 18.6 |
| AD-59743 | 61.4 | 108.2 | 8.7 | 4.4 |
| AD-60939 | 38.0 | 85.7 | 19.3 | 25.2 |
| AD-60940 | 24.2 | 22.6 | 10.1 | 9.7 |
| AD-60941 | 48.5 | 84.7 | 11.7 | 29.7 |
| AD-60942 | 102.9 | 111.2 | 4.3 | 44.8 |
| AD-60943 | 86.2 | 96.5 | 2.3 | 28.8 |
| AD-60944 | 24.6 | 78.5 | 1.1 | 36.5 |
| AD-60945 | 65.8 | 140.9 | 0.5 | 59.2 |
| AD-60946 | 50.3 | 105.9 | 4.1 | 31.2 |
| AD-60947 | 79.1 | 147.2 | 12.3 | 51.2 |
| AD-60948 | 81.0 | 113.9 | 0.6 | 32.7 |
| AD-60949 | 111.3 | 96.2 | 8.2 | 28.1 |
| AD-60950 | 53.8 | 93.2 | 7.6 | 42.3 |
| AD-60951 | 74.1 | 121.6 | 6.4 | 56.2 |
| AD-60952 | 47.6 | 118.3 | 8.1 | 52.4 |
| AD-60953 | 22.0 | 56.7 | 8.3 | 18.0 |
| AD-60954 | 23.3 | 55.8 | 5.3 | 31.7 |
| AD-60955 | 110.8 | 117.5 | 1.6 | 38.7 |
| AD-60956 | 15.8 | 29.6 | 1.7 | 10.2 |
| AD-60957 | 22.3 | 58.3 | 1.5 | 6.1 |
| AD-60958 | 106.4 | 136.0 | 24.1 | 61.7 |
| AD-60959 | 79.6 | 123.3 | 0.6 | 49.9 |
| AD-60960 | 17.4 | 49.4 | 8.6 | 10.2 |
| AD-60961 | 107.7 | 129.0 | 6.6 | 50.5 |
| AD-60962 | 90.2 | 113.3 | 8.0 | 67.2 |
| AD-60963 | 117.4 | 138.1 | 2.6 | 16.8 |
| AD-60964 | 80.7 | 123.2 | 24.2 | 18.9 |
| AD-60965 | 30.1 | 80.2 | 9.0 | 20.8 |
| AD-60966 | 54.1 | 133.6 | 4.6 | 44.0 |
| AD-60967 | 122.2 | 147.4 | 11.7 | 42.0 |
| AD-60968 | 86.9 | 142.0 | 39.9 | 49.7 |
| AD-60969 | 106.2 | 116.3 | 16.6 | 39.1 |
| AD-60970 | 54.6 | 112.6 | 7.3 | 11.8 |
| AD-60971 | 50.5 | 118.8 | 6.9 | 47.0 |
| AD-60972 | 55.6 | 94.2 | 6.5 | 3.4 |
| AD-60973 | 126.1 | 133.6 | 8.0 | 36.8 |
| AD-60974 | 82.6 | 115.0 | 8.7 | 43.7 |
| AD-60975 | 88.2 | 114.3 | 13.6 | 43.9 |
| AD-60976 | 46.3 | 71.0 | 11.6 | 30.2 |
| AD-60977 | 13.5 | 26.4 | 3.4 | 9.2 |
| AD-60978 | 72.7 | 92.9 | 6.4 | 31.7 |
| AD-60979 | 103.8 | 97.0 | 13.7 | 29.2 |
| AD-60980 | 28.4 | 58.0 | 12.3 | 21.1 |
| AD-60981 | 56.0 | 80.6 | 18.3 | 4.5 |
| AD-60982 | 102.4 | 137.4 | 15.2 | 16.4 |
| AD-60983 | 60.8 | 87.1 | 10.1 | 20.3 |
| AD-60984 | 53.6 | 116.7 | 1.2 | 47.8 |
| AD-60985 | 72.6 | 99.2 | 0.7 | 21.7 |
| AD-60986 | 90.1 | 96.4 | 6.6 | 29.5 |
| AD-60987 | 83.1 | 90.7 | 1.6 | 13.7 |
| AD-60988 | 69.4 | 102.3 | 2.4 | 55.4 |
| AD-60989 | 112.4 | 105.7 | 0.6 | 14.7 |
| AD-60990 | 90.4 | 93.4 | 6.2 | 4.1 |
| AD-60991 | 97.6 | 95.6 | 15.5 | 23.4 |
| AD-60992 | 104.0 | 131.4 | 6.9 | 33.7 |
| AD-60993 | 118.6 | 129.2 | 10.5 | 30.1 |
| AD-60994 | 25.9 | 57.2 | 6.8 | 0.3 |
| AD-60996 | 77.3 | 94.2 | 7.8 | 12.6 |
| AD-60997 | 60.1 | 80.9 | 18.8 | 7.5 |
| AD-60998 | 32.6 | 61.4 | 5.7 | 24.6 |
| AD-60999 | 133.6 | 110.9 | 39.7 | 15.4 |
| AD-61000 | 55.8 | 117.6 | 14.2 | 24.9 |
| AD-61001 | 57.9 | 85.2 | 8.1 | 42.0 |
| AD-61002 | 15.4 | 31.4 | 1.5 | 10.1 |
| AD-61003 | 82.3 | 98.1 | 4.0 | 11.8 |
| AD-61004 | 106.4 | 97.7 | 38.5 | 18.8 |
| AD-61005 | 138.0 | 141.2 | 65.7 | 20.0 |
| AD-61006 | 31.7 | 70.9 | 7.8 | 6.6 |

### Example 7. In Vivo Effect of Single Dose Administration of TMPRSS6 iRNA Agent

[0652] Female C57BL/6 mice were administered a single subcutaneous injection of AD-60940 at a dose of 0.3 mg/kg, 1.0 mg/kg or 3.0 mg/kg, or PBS alone as a control. Three mice were evaluated per dose for hepatic TMPRSS6 mRNA, hepatic hepcidin mRNA, serum hepcidin, total serum iron, and percent transferrin saturation at various time points. Mice receiving 1.0 mg/kg or 3.0 mg/kg of AD-60940 or PBS were evaluated at day 0 (pre-treatment) and 7, 11, 14 and 21 days after treatment. Mice receiving 0.3 mg/kg AD-60940 were evaluated at day 0 (pre-treatment) and at 7 and 11 days after treatment. Hepatic TMPRSS6 mRNA and hepatic hepcidin mRNA levels were determined by qPCR, normalized to GAPDH mRNA levels and expressed relative to the mRNA levels in mice administered PBS alone. Serum hepcidin was measured by ELISA (Intrinsic Life Sciences). Total serum iron and percent transferrin saturation (% TfSat) were measured using an Olympus AU400 Serum Chemistry Analyzer. Each data point represents the mean value from three mice. The standard deviation of the mean is represented by error bars.

[0653] Single dose administration of AD-60940 resulted in robust and durable suppression of hepatic TMPRSS6 mRNA relative to the control. TMPRSS6 mRNA concentration was suppressed by greater than 90% for up to three weeks following administration of the 3.0 mg/kg dose (FIG. 3A). As a result of the suppression of hepatic TMPRSS6 mRNA concentration, hepcidin mRNA levels, increased two-fold relative to the control (FIG. 3B), and serum hepcidin concentration increased greater than 2-fold relative to the control (FIG. 3C). In addition, total serum iron (FIG. 3D) decreased and percent transferrin saturation decreased by greater than 50% relative to the control (FIG. 3E). The decreases in total serum iron and percent transferring saturation were durable for up to three weeks following administration of AD-60940. FIG. 3F demonstrates the relative hepatic TMPRSS6 mRNA concentration as a function of AD-60940 dose at 11 days following administration. Each data point represents the maximum suppression of TMPRSS6 mRNA concentration observed at each dose level. The data were fit to the Hill equation.

[0654] The degree to which AD-60940 modulates hepcidin and serum iron mobilization is nearly identical to that observed in the previous Hbb^{th3/+} mouse studies (Schmidt et al., Blood (2013), 121(7), 1200-1208) and indicates that AD-60940 is a potent RNAi therapeutic for producing disease modifying effects in β-Thalassemia.

### Example 8. In Vivo Effect of Multi-Dose Administration of TMPRSS6 iRNA Agent

[0655] Female C57BL/6 mice were administered a subcutaneous injection of AD-60940 at a dose of 0.3 mg/kg, 1.0 mg/kg, or PBS alone (as a control) once per week for three weeks then sacrificed 7 days after the final dose (FIG. 4A). Three mice per dose were evaluated for hepatic TMPRSS6 mRNA, hepatic hepcidin mRNA, and percent transferrin saturation. Hepatic TMPRSS6 mRNA and hepatic hepcidin mRNA levels were determined by qPCR, normalized to GAPDH mRNA levels and expressed relative to the mRNA levels in mice administered PBS alone. Percent transferrin saturation (% TfSat) was measured using an Olympus AU400 Serum Chemistry Analyzer. Each data point represents the mean value from three mice. The standard deviation of the mean is represented by error bars.

[0656] Multi-dose administration of 1.0 mg/kg AD-60940 resulted in greater than 90% suppression of TMPRSS6 mRNA concentration (FIG. 4B). Hepcidin mRNA concentration increased two-fold and percent transferrin saturation decreased by greater than 50% relative to the control (FIG. 4B). FIG. 4C demonstrates the relative hepatic TMPRSS6 mRNA concentration as a function of AD-60940 dose. The data were fit to the Hill equation. These data indicate that the multi-dose ED80 is less than 1.0 mg/kg.

[0657] This study demonstrates that AD-60940 exhibits robust and durable suppression of TMPRSS6, resulting in hepcidin induction and systemic iron restriction and indicates that AD-60940 is a potent RNAi therapeutic for producing disease modifying effects in β-Thalassemia.

### Example 9. Relationship Between Liver TMPRSS6 mRNA Levels and Serum Hepcidin Concentration and Percent Transferrin Saturation

[0658] Data generated using AD-59743, AD-61002, AD-60940, and other TMPRSS6 iRNA agents were further analyzed to evaluate the relationship between liver TMPRSS6 mRNA levels and serum hepcidin levels and percent transferrin saturation. Serum hepcidin concentration demonstrated a non-linear relationship to TMPRSS6 mRNA levels using the Hill equation (FIG. 5A). The percent transferrin saturation demonstrated a linear relationship to TMPRSS6 mRNA levels when fit to a simple linear regression equation (FIG. 5B). The linear relationship between TMPRSS6 mRNA levels and percent transferrin saturation indicate that iron restriction can be precisely and predictably modulated by AD-60940. Serum hepcidin concentration and relative hepcidin mRNA levels also demonstrated a linear relationship when fit to a simple linear regression equation (FIG. 5C). In contrast, the relationship between percent transferrin saturation and serum hepcidin concentration was non-linear and fit to the Hill equation (FIG. 5D).

### Example 10. In Vivo Single Dose Screen

[0659] TMPRSS6 siRNA duplexes as indicated in FIG. 6 were evaluated for efficacy by their ability to suppress levels of TMPRSS6 mRNA in the liver of female C57BL/6 mice following administration of the siRNA duplex. A single subcutaneous dose of 3 mg/kg of TMPRSS6 siRNA duplex was administered, and the mice were sacrificed 7 days later. The level of TMPRSS6 mRNA in the liver was measured by qPCR using the methods described above. Mice in a control group received an injection of PBS.

[0660] The levels of TMPRSS6 mRNA following administration of a TMPRSS6 siRNA duplex are shown in FIG. 6. The results demonstrate that administration of AD-60940, AD-59743 and AD-61002 resulted in substantial suppression of liver TMPRSS6 mRNA with AD60940 producing the greatest silencing. Specifically, TMPRSS6 siRNA duplex AD-60940 reduced TMPRSS6 mRNA by greater than 80% relative to the control. The data also demonstrate that treatment with AD-59743, AD-60940, AD-61002, AD-60994, AD-60998 and AD-61001 result in a decrease in the level of TMPRSS6 transcript that is maintained through day 7.

### Example 11. In Vivo Multi-Dose Screen

[0661] TMPRSS6 siRNA duplexes as indicated in FIG. 7 were evaluated for efficacy by their ability to suppress levels of TMPRSS6 mRNA in the liver of wild-type C57BL/6 mice following administration of the siRNA duplex. A subcutaneous dose of either 0.3 mg/kg or 1.0 mg/kg of TMPRSS6 siRNA duplex was administered once a week for three weeks. The mice were sacrificed 7 days after the last dose. The level of TMPRSS6 mRNA in the liver was measured by qPCR using the methods described above. Mice in a control group received an injection of PBS.

[0662] The levels of TMPRSS6 mRNA following administration of a TMPRSS6 siRNA duplex are shown in FIG. 7. The results demonstrate that the 1.0 mg/kg dosing regimen of TMPRSS6 siRNA duplex AD-60940 reduces TMPRSS6 mRNA by greater than 80% relative to the control.

### Example 12. Optimization of AD-60940

[0663] Based on the observation that administration of AD-60940 durably reduced TMPRSS6 mRNA by greater than 80% relative to the control, additional siRNAs based on the parent sequence of AD-60940 with a variety of chemical modifications were evaluated for efficacy in single dose screens at 10 nM and 0.1 nM by transfection in Hep3B cells. The sequences of the sense and antisense strands of these agents are shown in Table 8 and the results of this screen are shown in Table 9. The data in Table 9 are expressed as the average fraction message remaining relative to control.

[0664] In addition, a subset of siRNA described in Tables 4 and 5, above, were modified to replace a 2′F with a 2′OMe modification at the 5′-end of the sense strand and to add a 5′-phosphate on the antisense strand. These siRNA agents were also evaluated for in vitro efficacy in single dose screens at 10 nM and 0.1 nM by transfection in Hep3B cells. The sequences of the sense and antisense strands of these agents are shown in Table 10 and the results of this screen are shown in Table 11. The data in Table 11 are expressed as the average fraction message remaining relative to control.

TABLE 8
TMPRSS6 Modified Sequences

| | | | SEQ | | | SEQ |
|---|---|---|---|---|---|---|
| | | | ID | | | ID |
| DuplexID | SenseID | Sense Sequence | NO: | AntisenseID | Antisense Sequence | NO: |
| AD-63214 | A-126586.2 | Y44CfsusGfgUfaUfuUfCfCfuAfgGfgUfaCfaAfL96 | 487 | A-126587.2 | PusUfsgUfaCfcCfuAfggaAfaUfaCfcAfgsasg | 544 |
| AD-63240 | A-122745.11 | CfsusGfgUfaUfuUfCfCfuAfgGfgUfaCfaAfL96 | 488 | A-126607.1 | usUfsguaCfcCfuAfggaAfaUfaccagsasg | 545 |
| AD-63209 | A-126594.1 | csusgguaUfuUfCfCfuaggGfdTacaaL96 | 489 | A-122746.13 | usUfsgUfaCfcCfuAfggaAfaUfaCfcAfgsasg | 546 |
| AD-63208 | A-122745.6 | CfsusGfgUfaUfuUfCfCfuAfgGfgUfaCfaAfL96 | 490 | A-126587.1 | PusUfsgUfaCfcCfuAfggaAfaUfaCfcAfgsasg | 547 |
| AD-63202 | A-126586.1 | Y44CfsusGfgUfaUfuUfCfCfuAfgGfgUfaCfaAfL96 | 491 | A-122746.6 | usUfsgUfaCfcCfuAfggaAfaUfaCfcAfgsasg | 548 |
| AD-63216 | A-122745.7 | CfsusGfgUfaUfuUfCfCfuAfgGfgUfaCfaAfL96 | 492 | A-126603.1 | usUfsgUfaCfccuAfggaAfaUfaCfcAfgsasg | 549 |
| AD-63219 | A-126617.1 | gsgsUfaUfuUfCfCfuAfgGfgUfaCfaAfL96 | 493 | A-126618.1 | PusUfsgUfaCfcCfuAfggaAfaUfaCfcsasg | 550 |
| AD-63228 | A-122745.9 | CfsusGfgUfaUfuUfCfCfuAfgGfgUfaCfaAfL96 | 494 | A-126605.1 | usUfsgUfaCfcCfuAfggaAfaUfaccagsasg | 551 |
| AD-63205 | A-122745.13 | CfsusGfgUfaUfuUfCfCfuAfgGfgUfaCfaAfL96 | 495 | A-126609.1 | usUfsgUfaccCfuaggaAfaUfaccAfgsasg | 552 |
| AD-63241 | A-126589.2 | csusgguaUfuUfCfCfuaggGfuacaaL96 | 496 | A-126611.3 | usUfsguaCfccUfaggaAfaUfaccagsasg | 553 |
| AD-63243 | A-126621.3 | csusGfguaUfuUfCfCfuAfgGfguAfcaaL96 | 497 | A-126624.1 | usUfsGfuaCfcCfuAfggaAfAfuaCfcAfgsasg | 554 |
| AD-63203 | A-126593.1 | csusgguaUfuUfCfCfuaggGfuadCaaL96 | 498 | A-122746.12 | usUfsgUfaCfcCfuAfggaAfaUfaCfcAfgsasg | 555 |
| AD-63223 | A-122745.16 | CfsusGfgUfaUfuUfCfCfuAfgGfgUfaCfaAfL96 | 499 | A-126612.1 | usUfsguaCfccuaggaAfaUfaccagsasg | 556 |
| AD-63231 | A-126621.1 | csusGfguaUfuUfCfCfuAfgGfguAfcaaL96 | 500 | A-126622.1 | usUfsGfuaCfcCfuAfggaAfaUfaCfcAfgsasg | 557 |
| AD-63199 | A-122745.12 | CfsusGfgUfaUfuUfCfCfuAfgGfgUfaCfaAfL96 | 501 | A-126608.1 | usUfsgUfaccCfuAfggaAfaUfaccAfgsasg | 558 |
| AD-63217 | A-122745.15 | CfsusGfgUfaUfuUfCfCfuAfgGfgUfaCfaAfL96 | 502 | A-126611.1 | usUfsguaCfccUfaggaAfaUfaccagsasg | 559 |
| AD-63229 | A-122745.17 | CfsusGfgUfaUfuUfCfCfuAfgGfgUfaCfaAfL96 | 503 | A-126613.1 | usUfsguaCfcCfUfaggaAfaUfaccagsasg | 560 |
| AD-63255 | A-126621.5 | csusGfguaUfuUfCfCfuAfgGfguAfcaaL96 | 504 | A-126626.1 | usUfsGfuAfCfcCfuAfggaAfAfuaCfcAfgsasg | 561 |
| AD-63226 | A-126589.1 | csusgguaUfuUfCfCfuaggGfuacaaL96 | 505 | A-122746.8 | usUfsgUfaCfcCfuAfggaAfaUfaCfcAfgsasg | 562 |
| AD-63211 | A-122745.14 | CfsusGfgUfaUfuUfCfCfuAfgGfgUfaCfaAfL96 | 506 | A-126610.1 | usUfsgUfacccuAfggaAfaUfaccAfgsasg | 563 |
| AD-63273 | A-126621.8 | csusGfguaUfuUfCfCfuAfgGfguAfcaaL96 | 507 | A-126629.1 | usUfsGfuaCfcCfuAfggaAfAfuAfccagsasg | 564 |
| AD-60940 | A-122745.1 | CfsusGfgUfaUfuUfCfCfuAfgGfgUfaCfaAfL96 | 508 | A-122746.1 | usUfsgUfaCfcCfuAfggaAfaUfaCfcAfgsasg | 565 |
| AD-63249 | A-126621.4 | csusGfguaUfuUfCfCfuAfgGfguAfcaaL96 | 509 | A-126625.1 | usUfsGfuAfCfcCfuAfggaAfAfuAfCfcAfgsasg | 566 |
| AD-63256 | A-122745.19 | CfsusGfgUfaUfuUfCfCfuAfgGfgUfaCfaAfL96 | 510 | A-126634.1 | usUfsgUfaccCfuAfggaAfaUfaCfcAfgsasg | 567 |
| AD-63280 | A-126639.1 | csusGfgUfaUfuUfCfCfuAfgGfgUfaCfaAfL96 | 511 | A-126587.3 | PusUfsgUfaCfcCfuAfggaAfaUfaCfcAfgsasg | 568 |
| AD-63237 | A-126621.2 | csusGfguaUfuUfCfCfuAfgGfguAfcaaL96 | 512 | A-126623.1 | usUfsGfuAfCfcCfuAfggaAfaUfaCfcAfgsasg | 569 |
| AD-63285 | A-126621.10 | csusGfguaUfuUfCfCfuAfgGfguAfcaaL96 | 513 | A-126631.1 | usUfsGfuaCfcCfuAfggaAfAfuAfccAfgsasg | 570 |
| AD-63215 | A-126595.1 | csusgguaUfuUfCfdCuaggGfuacaaL96 | 514 | A-122746.14 | usUfsgUfaCfcCfuAfggaAfaUfaCfcAfgsasg | 571 |
| AD-63222 | A-122745.8 | CfsusGfgUfaUfuUfCfCfuAfgGfgUfaCfaAfL96 | 515 | A-126604.1 | usUfsguaCfcCfuAfggaAfaUfaccAfgsasg | 572 |
| AD-63232 | A-126590.1 | csusgguAfuuUfcCfUfagGfGfuacaaL96 | 516 | A-122746.9 | usUfsgUfaCfcCfuAfggaAfaUfaCfcAfgsasg | 573 |
| AD-63218 | A-126594.2 | csusgguaUfuUfCfCfuaggGfdTacaaL96 | 517 | A-126611.7 | usUfsguaCfccUfaggaAfaUfaccagsasg | 574 |
| AD-63261 | A-126621.6 | csusGfguaUfuUfCfCfuAfgGfguAfcaaL96 | 518 | A-126627.1 | usUfsGfuaCfcCfuAfggaAfAfuAfCfcagsasg | 575 |
| AD-63267 | A-126621.7 | csusGfguaUfuUfCfCfuAfgGfguAfcaaL96 | 519 | A-126628.1 | usUfsGfuAfCfcCfuAfggaAfAfuAfCfcagsasg | 576 |
| AD-63234 | A-122745.10 | CfsusGfgUfaUfuUfCfCfuAfgGfgUfaCfaAfL96 | 520 | A-126606.1 | usUfsguaCfccuAfggaAfaUfaccAfgsasg | 577 |
| AD-63250 | A-122745.18 | CfsusGfgUfaUfuUfCfCfuAfgGfgUfaCfaAfL96 | 521 | A-126633.1 | ususgUfaCfcCfuAfggaAfaUfaCfcAfgsasg | 578 |
| AD-63212 | A-126593.2 | csusgguaUfuUfCfCfuaggGfuadCaaL96 | 522 | A-126611.6 | usUfsguaCfccUfaggaAfaUfaccagsasg | 579 |
| AD-63210 | A-126602.1 | csusgguauuucdCuaggg(Tgn)acaaL96 | 523 | A-122746.21 | usUfsgUfaCfcCfuAfggaAfaUfaCfcAfgsasg | 580 |
| AD-63244 | A-126621.11 | csusGfguaUfuUfCfCfuAfgGfguAfcaaL96 | 524 | A-126632.1 | usUfsGfuAfCfcCfuAfggaAfAfuAfccAfgsasg | 581 |
| AD-63235 | A-126588.2 | csusgguAfuuuCfCfuAfggGfuacaaL96 | 525 | A-126611.2 | usUfsguaCfccUfaggaAfaUfaccagsasg | 582 |
| AD-63279 | A-126621.9 | csusGfguaUfuUfCfCfuAfgGfguAfcaaL96 | 526 | A-126630.1 | usUfsGfuAfCfcCfuAfggaAfAfuAfccagsasg | 583 |
| AD-63227 | A-126597.1 | csusgguAfuuucCfuagggdTacaaL96 | 527 | A-122746.16 | usUfsgUfaCfcCfuAfggaAfaUfaCfcAfgsasg | 584 |
| AD-63220 | A-126588.1 | csusgguAfuuuCfCfuAfggGfuacaaL96 | 528 | A-122746.7 | usUfsgUfaCfcCfuAfggaAfaUfaCfcAfgsasg | 585 |
| AD-63238 | A-126591.1 | csusgguAfuuucCfuaggguacaaL96 | 529 | A-122746.10 | usUfsgUfaCfcCfuAfggaAfaUfaCfcAfgsasg | 586 |
| AD-63242 | A-126598.2 | csusgguAfuuucCfdTaggguacaaL96 | 530 | A-126611.11 | usUfsguaCfccUfaggaAfaUfaccagsasg | 587 |
| AD-63239 | A-126599.1 | csusgguauuucCfdTaggguacaaL96 | 531 | A-122746.18 | usUfsgUfaCfcCfuAfggaAfaUfaCfcAfgsasg | 588 |
| AD-63233 | A-126598.1 | csusgguAfuuucCfdTaggguacaaL96 | 532 | A-122746.17 | usUfsgUfaCfcCfuAfggaAfaUfaCfcAfgsasg | 589 |
| AD-63268 | A-126636.1 | CfsusGfgUfaUfuUfCfcuAfgGfgUfaCfaAfL96 | 533 | A-122746.22 | usUfsgUfaCfcCfuAfggaAfaUfaCfcAfgsasg | 590 |
| AD-63221 | A-126596.1 | csusgguAfuuucCfuaggguadCaaL96 | 534 | A-122746.15 | usUfsgUfaCfcCfuAfggaAfaUfaCfcAfgsasg | 591 |
| AD-63236 | A-126597.2 | csusgguAfuuucCfuagggdTacaaL96 | 535 | A-126611.10 | usUfsguaCfccUfaggaAfaUfaccagsasg | 592 |
| AD-63197 | A-126592.1 | csusgguauuucCfUfaggguacaaL96 | 536 | A-122746.11 | usUfsgUfaCfcCfuAfggaAfaUfaCfcAfgsasg | 593 |
| AD-63224 | A-126595.2 | csusgguaUfuUfCfdCuaggGfuacaaL96 | 537 | A-126611.8 | usUfsguaCfccUfaggaAfaUfaccagsasg | 594 |
| AD-63200 | A-126590.2 | csusgguAfuuUfcCfUfagGfGfuacaaL96 | 538 | A-126611.4 | usUfsguaCfccUfaggaAfaUfaccagsasg | 595 |
| AD-63262 | A-122745.20 | CfsusGfgUfaUfuUfCfCfuAfgGfgUfaCfaAfL96 | 539 | A-126635.1 | usUfsgUfaCfcCfuAfggaaaUfaCfcAfgsasg | 596 |
| AD-63204 | A-126601.1 | csusgguauuucdCuaggguacaaL96 | 540 | A-122746.20 | usUfsgUfaCfcCfuAfggaAfaUfaCfcAfgsasg | 597 |
| AD-63230 | A-126596.2 | csusgguAfuuucCfuaggguadCaaL96 | 541 | A-126611.9 | usUfsguaCfccUfaggaAfaUfaccagsasg | 598 |
| AD-63198 | A-126600.1 | csusgguauuucdCdTaggguacaaL96 | 542 | A-122746.19 | usUfsgUfaCfcCfuAfggaAfaUfaCfcAfgsasg | 599 |
| AD-63206 | A-126591.2 | csusgguAfuuucCfuaggguacaaL96 | 543 | A-126611.5 | usUfsguaCfccUfaggaAfaUfaccagsasg | 600 |

TABLE 9
TMPRSS6 Single Dose Screen

| | 10 nM | 0.1 nM |
|---|---|---|
| DuplexID | Avg | Avg |
| AD-63214 | 12.40 | 19.46 |
| AD-63240 | 12.29 | 27.03 |
| AD-63209 | 17.11 | 23.38 |
| AD-63208 | 14.77 | 23.31 |
| AD-63202 | 14.87 | 27.08 |
| AD-63216 | 15.97 | 34.05 |
| AD-63219 | 18.47 | 27.82 |
| AD-63228 | 19.44 | 34.52 |
| AD-63205 | 15.44 | 38.23 |
| AD-63241 | 18.81 | 41.42 |
| AD-63243 | 19.15 | 30.87 |
| AD-63203 | 17.06 | 42.12 |
| AD-63223 | 21.98 | 27.52 |
| AD-63231 | 22.42 | 30.68 |
| AD-63199 | 17.74 | 39.50 |
| AD-63217 | 18.81 | 38.99 |
| AD-63229 | 22.33 | 33.42 |
| AD-63255 | 21.06 | 34.31 |
| AD-63226 | 18.36 | 41.65 |
| AD-63211 | 26.00 | 32.07 |
| AD-63273 | 23.11 | 34.96 |
| AD-60940 | 22.99 | 34.34 |
| AD-63249 | 30.83 | 28.35 |
| AD-63256 | 23.18 | 35.19 |
| AD-63280 | 25.10 | 32.42 |
| AD-63237 | 23.95 | 35.43 |
| AD-63285 | 21.53 | 39.60 |
| AD-63215 | 29.27 | 42.54 |
| AD-63222 | 23.88 | 38.24 |
| AD-63232 | 30.29 | 35.04 |
| AD-63218 | 27.02 | 37.31 |
| AD-63261 | 24.22 | 46.61 |
| AD-63267 | 28.32 | 38.90 |
| AD-63234 | 24.42 | 55.83 |
| AD-63250 | 26.77 | 47.92 |
| AD-63212 | 28.43 | 46.01 |
| AD-63210 | 27.91 | 44.35 |
| AD-63244 | 30.66 | 45.65 |
| AD-63235 | 32.75 | 51.82 |
| AD-63279 | 38.00 | 48.80 |
| AD-63227 | 33.15 | 58.12 |
| AD-63220 | 38.31 | 54.08 |
| AD-63238 | 45.56 | 51.50 |
| AD-63242 | 47.96 | 54.26 |
| AD-63239 | 51.98 | 49.22 |
| AD-63233 | 51.37 | 65.83 |
| AD-63268 | 41.22 | 82.16 |
| AD-63221 | 57.02 | 65.11 |
| AD-63236 | 49.86 | 71.66 |
| AD-63197 | 47.67 | 78.29 |
| AD-63224 | 67.73 | 60.88 |
| AD-63200 | 62.89 | 67.68 |
| AD-63262 | 64.25 | 79.72 |
| AD-63204 | 68.01 | 80.99 |
| AD-63230 | 66.88 | 81.04 |
| AD-63198 | 65.67 | 78.28 |
| AD-63206 | 65.10 | 82.71 |

TABLE 10
TMPRSS6 Modified Sequences

| | | | SEQ | | | SEQ |
|---|---|---|---|---|---|---|
| | | | ID | | | ID |
| DuplexID | SenseID | Sense Sequence | NO: | AntisenseID | Antisense Sequence | NO: |
| AD-63214 | A-126586.2 | Y44CfsusGfgUfaUfuUfCfCfuAfgGfgUfaCfaAfL96 | 601 | A-126587.2 | PusUfsgUfaCfcCfuAfggaAfaUfaCfcAfgsasg | 658 |
| AD-63240 | A-122745.11 | CfsusGfgUfaUfuUfCfCfuAfgGfgUfaCfaAfL96 | 602 | A-126607.1 | usUfsguaCfcCfuAfggaAfaUfaccagsasg | 659 |
| AD-63209 | A-126594.1 | csusgguaUfuUfCfCfuaggGfdTacaaL96 | 603 | A-122746.13 | usUfsgUfaCfcCfuAfggaAfaUfaCfcAfgsasg | 660 |
| AD-63208 | A-122745.6 | CfsusGfgUfaUfuUfCfCfuAfgGfgUfaCfaAfL96 | 604 | A-126587.1 | PusUfsgUfaCfcCfuAfggaAfaUfaCfcAfgsasg | 661 |
| AD-63202 | A-126586.1 | Y44CfsusGfgUfaUfuUfCfCfuAfgGfgUfaCfaAfL96 | 605 | A-122746.6 | usUfsgUfaCfcCfuAfggaAfaUfaCfcAfgsasg | 662 |
| AD-63216 | A-122745.7 | CfsusGfgUfaUfuUfCfCfuAfgGfgUfaCfaAfL96 | 606 | A-126603.1 | usUfsgUfaCfccuAfggaAfaUfaCfcAfgsasg | 663 |
| AD-63219 | A-126617.1 | gsgsUfaUfuUfCfCfuAfgGfgUfaCfaAfL96 | 607 | A-126618.1 | PusUfsgUfaCfcCfuAfggaAfaUfaCfcsasg | 664 |
| AD-63228 | A-122745.9 | CfsusGfgUfaUfuUfCfCfuAfgGfgUfaCfaAfL96 | 608 | A-126605.1 | usUfsgUfaCfcCfuAfggaAfaUfaccagsasg | 665 |
| AD-63205 | A-122745.13 | CfsusGfgUfaUfuUfCfCfuAfgGfgUfaCfaAfL96 | 609 | A-126609.1 | usUfsgUfaccCfuaggaAfaUfaccAfgsasg | 666 |
| AD-63241 | A-126589.2 | csusgguaUfuUfCfCfuaggGfuacaaL96 | 610 | A-126611.3 | usUfsguaCfccUfaggaAfaUfaccagsasg | 667 |
| AD-63243 | A-126621.3 | csusGfguaUfuUfCfCfuAfgGfguAfcaaL96 | 611 | A-126624.1 | usUfsGfuaCfcCfuAfggaAfAfuaCfcAfgsasg | 668 |
| AD-63203 | A-126593.1 | csusgguaUfuUfCfCfuaggGfuadCaaL96 | 612 | A-122746.12 | usUfsgUfaCfcCfuAfggaAfaUfaCfcAfgsasg | 669 |
| AD-63223 | A-122745.16 | CfsusGfgUfaUfuUfCfCfuAfgGfgUfaCfaAfL96 | 613 | A-126612.1 | usUfsguaCfccuaggaAfaUfaccagsasg | 670 |
| AD-63231 | A-126621.1 | csusGfguaUfuUfCfCfuAfgGfguAfcaaL96 | 614 | A-126622.1 | usUfsGfuaCfcCfuAfggaAfaUfaCfcAfgsasg | 671 |
| AD-63199 | A-122745.12 | CfsusGfgUfaUfuUfCfCfuAfgGfgUfaCfaAfL96 | 615 | A-126608.1 | usUfsgUfaccCfuAfggaAfaUfaccAfgsasg | 672 |
| AD-63217 | A-122745.15 | CfsusGfgUfaUfuUfCfCfuAfgGfgUfaCfaAfL96 | 616 | A-126611.1 | usUfsguaCfccUfaggaAfaUfaccagsasg | 673 |
| AD-63229 | A-122745.17 | CfsusGfgUfaUfuUfCfCfuAfgGfgUfaCfaAfL96 | 617 | A-126613.1 | usUfsguaCfcCfUfaggaAfaUfaccagsasg | 674 |
| AD-63255 | A-126621.5 | csusGfguaUfuUfCfCfuAfgGfguAfcaaL96 | 618 | A-126626.1 | usUfsGfuAfCfcCfuAfggaAfAfuaCfcAfgsasg | 675 |
| AD-63226 | A-126589.1 | csusgguaUfuUfCfCfuaggGfuacaaL96 | 619 | A-122746.8 | usUfsgUfaCfcCfuAfggaAfaUfaCfcAfgsasg | 676 |
| AD-63211 | A-122745.14 | CfsusGfgUfaUfuUfCfCfuAfgGfgUfaCfaAfL96 | 620 | A-126610.1 | usUfsgUfacccuAfggaAfaUfaccAfgsasg | 677 |
| AD-63273 | A-126621.8 | csusGfguaUfuUfCfCfuAfgGfguAfcaaL96 | 621 | A-126629.1 | usUfsGfuaCfcCfuAfggaAfAfuAfccagsasg | 678 |
| AD-60940 | A-122745.1 | CfsusGfgUfaUfuUfCfCfuAfgGfgUfaCfaAfL96 | 622 | A-122746.1 | usUfsgUfaCfcCfuAfggaAfaUfaCfcAfgsasg | 679 |
| AD-63249 | A-126621.4 | csusGfguaUfuUfCfCfuAfgGfguAfcaaL96 | 623 | A-126625.1 | usUfsGfuAfCfcCfuAfggaAfAfuAfCfcAfgsasg | 680 |
| AD-63256 | A-122745.19 | CfsusGfgUfaUfuUfCfCfuAfgGfgUfaCfaAfL96 | 624 | A-126634.1 | usUfsgUfaccCfuAfggaAfaUfaCfcAfgsasg | 681 |
| AD-63280 | A-126639.1 | csusGfgUfaUfuUfCfCfuAfgGfgUfaCfaAfL96 | 625 | A-126587.3 | PusUfsgUfaCfcCfuAfggaAfaUfaCfcAfgsasg | 682 |
| AD-63237 | A-126621.2 | csusGfguaUfuUfCfCfuAfgGfguAfcaaL96 | 626 | A-126623.1 | usUfsGfuAfCfcCfuAfggaAfaUfaCfcAfgsasg | 683 |
| AD-63285 | A-126621.10 | csusGfguaUfuUfCfCfuAfgGfguAfcaaL96 | 627 | A-126631.1 | usUfsGfuaCfcCfuAfggaAfAfuAfccAfgsasg | 684 |
| AD-63215 | A-126595.1 | csusgguaUfuUfCfdCuaggGfuacaaL96 | 628 | A-122746.14 | usUfsgUfaCfcCfuAfggaAfaUfaCfcAfgsasg | 685 |
| AD-63222 | A-122745.8 | CfsusGfgUfaUfuUfCfCfuAfgGfgUfaCfaAfL96 | 629 | A-126604.1 | usUfsguaCfcCfuAfggaAfaUfaccAfgsasg | 686 |
| AD-63232 | A-126590.1 | csusgguAfuuUfcCfUfagGfGfuacaaL96 | 630 | A-122746.9 | usUfsgUfaCfcCfuAfggaAfaUfaCfcAfgsasg | 687 |
| AD-63218 | A-126594.2 | csusgguaUfuUfCfCfuaggGfdTacaaL96 | 631 | A-126611.7 | usUfsguaCfccUfaggaAfaUfaccagsasg | 688 |
| AD-63261 | A-126621.6 | csusGfguaUfuUfCfCfuAfgGfguAfcaaL96 | 632 | A-126627.1 | usUfsGfuaCfcCfuAfggaAfAfuAfCfcagsasg | 689 |
| AD-63267 | A-126621.7 | csusGfguaUfuUfCfCfuAfgGfguAfcaaL96 | 633 | A-126628.1 | usUfsGfuAfCfcCfuAfggaAfAfuAfCfcagsasg | 690 |
| AD-63234 | A-122745.10 | CfsusGfgUfaUfuUfCfCfuAfgGfgUfaCfaAfL96 | 634 | A-126606.1 | usUfsguaCfccuAfggaAfaUfaccAfgsasg | 691 |
| AD-63250 | A-122745.18 | CfsusGfgUfaUfuUfCfCfuAfgGfgUfaCfaAfL96 | 635 | A-126633.1 | ususgUfaCfcCfuAfggaAfaUfaCfcAfgsasg | 692 |
| AD-63212 | A-126593.2 | csusgguaUfuUfCfCfuaggGfuadCaaL96 | 636 | A-126611.6 | usUfsguaCfccUfaggaAfaUfaccagsasg | 693 |
| AD-63210 | A-126602.1 | csusgguauuucdCuaggg(Tgn)acaaL96 | 637 | A-122746.21 | usUfsgUfaCfcCfuAfggaAfaUfaCfcAfgsasg | 694 |
| AD-63244 | A-126621.11 | csusGfguaUfuUfCfCfuAfgGfguAfcaaL96 | 638 | A-126632.1 | usUfsGfuAfCfcCfuAfggaAfAfuAfccAfgsasg | 695 |
| AD-63235 | A-126588.2 | csusgguAfuuuCfCfuAfggGfuacaaL96 | 639 | A-126611.2 | usUfsguaCfccUfaggaAfaUfaccagsasg | 696 |
| AD-63279 | A-126621.9 | csusGfguaUfuUfCfCfuAfgGfguAfcaaL96 | 640 | A-126630.1 | usUfsGfuAfCfcCfuAfggaAfAfuAfccagsasg | 697 |
| AD-63227 | A-126597.1 | csusgguAfuuucCfuagggdTacaaL96 | 641 | A-122746.16 | usUfsgUfaCfcCfuAfggaAfaUfaCfcAfgsasg | 698 |
| AD-63220 | A-126588.1 | csusgguAfuuuCfCfuAfggGfuacaaL96 | 642 | A-122746.7 | usUfsgUfaCfcCfuAfggaAfaUfaCfcAfgsasg | 699 |
| AD-63238 | A-126591.1 | csusgguAfuuucCfuaggguacaaL96 | 643 | A-122746.10 | usUfsgUfaCfcCfuAfggaAfaUfaCfcAfgsasg | 700 |
| AD-63242 | A-126598.2 | csusgguAfuuucCfdTaggguacaaL96 | 644 | A-126611.11 | usUfsguaCfccUfaggaAfaUfaccagsasg | 701 |
| AD-63239 | A-126599.1 | csusgguauuucCfdTaggguacaaL96 | 645 | A-122746.18 | usUfsgUfaCfcCfuAfggaAfaUfaCfcAfgsasg | 702 |
| AD-63233 | A-126598.1 | csusgguAfuuucCfdTaggguacaaL96 | 646 | A-122746.17 | usUfsgUfaCfcCfuAfggaAfaUfaCfcAfgsasg | 703 |
| AD-63268 | A-126636.1 | CfsusGfgUfaUfuUfCfcuAfgGfgUfaCfaAfL96 | 647 | A-122746.22 | usUfsgUfaCfcCfuAfggaAfaUfaCfcAfgsasg | 704 |
| AD-63221 | A-126596.1 | csusgguAfuuucCfuaggguadCaaL96 | 648 | A-122746.15 | usUfsgUfaCfcCfuAfggaAfaUfaCfcAfgsasg | 705 |
| AD-63236 | A-126597.2 | csusgguAfuuucCfuagggdTacaaL96 | 649 | A-126611.10 | usUfsguaCfccUfaggaAfaUfaccagsasg | 706 |
| AD-63197 | A-126592.1 | csusgguauuucCfUfaggguacaaL96 | 650 | A-122746.11 | usUfsgUfaCfcCfuAfggaAfaUfaCfcAfgsasg | 707 |
| AD-63224 | A-126595.2 | csusgguaUfuUfCfdCuaggGfuacaaL96 | 651 | A-126611.8 | usUfsguaCfccUfaggaAfaUfaccagsasg | 708 |
| AD-63200 | A-126590.2 | csusgguAfuuUfcCfUfagGfGfuacaaL96 | 652 | A-126611.4 | usUfsguaCfccUfaggaAfaUfaccagsasg | 709 |
| AD-63262 | A-122745.20 | CfsusGfgUfaUfuUfCfCfuAfgGfgUfaCfaAfL96 | 653 | A-126635.1 | usUfsgUfaCfcCfuAfggaaaUfaCfcAfgsasg | 710 |
| AD-63204 | A-126601.1 | csusgguauuucdCuaggguacaaL96 | 654 | A-122746.20 | usUfsgUfaCfcCfuAfggaAfaUfaCfcAfgsasg | 711 |
| AD-63230 | A-126596.2 | csusgguAfuuucCfuaggguadCaaL96 | 655 | A-126611.9 | usUfsguaCfccUfaggaAfaUfaccagsasg | 712 |
| AD-63198 | A-126600.1 | csusgguauuucdCdTaggguacaaL96 | 656 | A-122746.19 | usUfsgUfaCfcCfuAfggaAfaUfaCfcAfgsasg | 713 |
| AD-63206 | A-126591.2 | csusgguAfuuucCfuaggguacaaL96 | 657 | A-126611.5 | usUfsguaCfccUfaggaAfaUfaccagsasg | 714 |

TABLE 11
TMPRSS6 Single Dose Screen

| | |
|---|---|
| 10 nM | 0.1 nM |

| DuplexID | Avg | SD | Avg | SD |
|---|---|---|---|---|
| AD-60998 | 26.1 | 3.1 | 42.9 | 13.3 |
| AD-60970 | 24.3 | 9.3 | 39.0 | 24.2 |
| AD-61002 | 27.5 | 8.5 | 32.1 | 9.8 |
| AD-60994 | 19.9 | 5.8 | 28.2 | 9.3 |
| AD-60992 | 57.9 | 15.4 | 67.5 | 13.6 |
| AD-61006 | 25.8 | 2.5 | 33.4 | 8.7 |
| AD-59743 | 21.1 | 3.2 | 31.7 | 8.1 |
| AD-60966 | 64.6 | 15.6 | 76.0 | 18.2 |
| AD-60952 | 44.1 | 10.7 | 76.9 | 16.5 |
| AD-61000 | 37.2 | 5.8 | 43.3 | 12.7 |
| AD-60949 | 94.9 | 22.3 | 91.3 | 13.2 |
| AD-60969 | 100.7 | 18.5 | 124.5 | 43.0 |
| AD-60967 | 93.7 | 6.4 | 112.1 | 31.5 |
| AD-60984 | 44.7 | 21.4 | 58.2 | 9.6 |
| AD-60943 | 65.6 | 11.0 | 61.7 | 9.8 |
| AD-61001 | 69.2 | 8.3 | 100.8 | 8.4 |
| AD-60986 | 38.9 | 13.9 | 58.9 | 4.8 |
| AD-60988 | 61.7 | 12.0 | 68.6 | 15.2 |
| AD-60993 | 92.1 | 13.1 | 86.5 | 10.0 |
| AD-60987 | 113.9 | 15.3 | 97.9 | 21.0 |
| AD-60997 | 54.8 | 7.2 | 75.8 | 16.4 |
| AD-60973 | 61.5 | 15.7 | 80.8 | 9.3 |
| AD-61005 | 116.8 | 23.4 | 128.1 | 10.8 |
| AD-60985 | 71.2 | 15.1 | 78.7 | 14.6 |
| AD-61003 | 101.0 | 15.2 | 97.5 | 15.8 |
| AD-60989 | 75.8 | 9.8 | 97.2 | 20.8 |
| AD-60955 | 108.6 | 23.4 | 102.0 | 16.6 |
| AD-60991 | 96.6 | 19.4 | 95.6 | 12.4 |
| AD-61004 | 111.1 | 6.4 | 110.9 | 18.3 |
| AD-60961 | 96.9 | 36.0 | 84.1 | 28.2 |
| AD-60999 | 106.7 | 12.7 | 92.3 | 24.6 |
| AD-60990 | 92.9 | 38.4 | 97.6 | 16.8 |
| AD-60996 | 71.2 | 7.5 | 101.5 | 8.9 |

### Example 13. Optimization of AD-60940

[0665] Additional duplexes targeting TMPRSS6 were produced and screened in vitro for efficacy using the materials and methods below.

Design, Synthesis, and In Vitro Screening of Additional siRNAs
siRNA Design

[0666] TMPRSS6 duplexes, 19 nucleotides long for both the sense and antisense strand, were designed using the human TMPRSS6 mRNA sequence set forth in GenBank Accession No. NM_153609.3. Three thousand one hundred and eighty duplexes were initially identified that did not contain repeats longer than 7 nucleotides, spanning substantially the entire 3209 nucleotide transcript. All 3180 duplexes were then scored for predicted efficacy according to a linear model that evaluates the nucleotide pair at each duplex position, and the dose and cell line used for screening. The duplexes were also matched against all transcripts in the human RefSeq collection using a custom brute force algorithm, and scored for lowest numbers of mismatches (per strand) to transcripts other than TMPRSS6. Duplexes to be synthesized and screened were then selected from the 3180, according to the following scheme: Beginning at the 5′ end of the transcript, a duplex was selected within a “window” of every 10±2 nucleotides that had the highest predicted efficacy, had at least one mismatch in both strands to all transcripts other than TMPRSS6, and had not already been synthesized and screened as part of other duplex sets. If no duplex is identified within a given window that satisfied all criteria, that window was skipped. Three hundred and three duplexes were selected according to the above criteria. An additional 31 duplexes were also selected.

[0667] A detailed list of the 334 TMPRSS6 sense and antisense strand sequences is shown in Table 12.

### Cell Culture and Transfections

[0668] Hep3B2.1-7 cells were obtained from American Type Culture Collection (Rockville, Md., cat. No. HB-8064) and cultured in EMEM (ATCC #30-2003), supplemented to contain 10% fetal calf serum (FCS) (Biochrom AG, Berlin, Germany, cat. No. S0115) and Penicillin 100 U/ml, Streptomycin 100 mg/ml (Biochrom AG, Berlin, Germany, cat. No. A2213), at 37° C. in an atmosphere with 5% CO₂ in a humidified incubator (Heraeus HERAcell, Kendro Laboratory Products, Langenselbold, Germany).

[0669] Transfection of dsRNA was performed directly after seeding 15,000 cells/well on a 96-well plate, and was carried out with Lipofectamine 2000 (Invitrogen GmbH, Karlsruhe, Germany, cat.No. 11668-019) as described by the manufacturer. Transfections were performed in quadruplicates and dsRNAs were transfected at a concentration of 10 nM.

### Branched DNA Assays-QunatiGene 2.0 (Panomics Cat #: QS0011)

[0670] For measurement of TMPRSS6 mRNA cells were harvested 24 hours after transfection and lysed at 53° C. following procedures recommended by the manufacturer of the Quantigene II Kit for TMPRSS6 and Quantigene I Explore Kit for bDNA (Panomics, Fremont, Calif., USA, cat. No. 15735 or QG0004, respectively). Subsequently, 50 μl of the lysates were incubated with probesets specific to human TMPRSS6 and 10 μl of the lysates for human GAPDH and processed according to the manufacturer's protocol for QuantiGene. Chemoluminescence was measured in a Victor2-Light (Perkin Elmer, Wiesbaden, Germany) as RLUs (relative light units) and values obtained with the human TMPRSS6 probeset were normalized to the respective human GAPDH values for each well and then related to the mean of three unrelated control dsRNAs.

[0671] The in vitro efficacy of the compounds is shown in Table 13.

TABLE 12
Additional modified TMPRSS6 siRNAs

| | | SEQ | | Position in | | SEQ ID | |
|---|---|---|---|---|---|---|---|
| Duplex ID | Sense Sequence | ID NO: | Sense ID | NM_153609.3 | Antisense Sequence | NO: | Antisense ID |
| AD-63290.1 | UGAGCCAGACCCAGUCCAGdTdT | 715 | A-126858.1 | 3-21 | CUGGACUGGGUCUGGCUCAdTdT | 1049 | A-126859.1 |
| AD-63296.1 | GACCCAGUCCAGCUCUGGUdTdT | 716 | A-126860.1 | 10-28 | ACCAGAGCUGGACUGGGUCdTdT | 1050 | A-126861.1 |
| AD-63302.1 | CUCUGGUGCCUGCCCUCUGdTdT | 717 | A-126862.1 | 22-40 | CAGAGGGCAGGCACCAGAGdTdT | 1051 | A-126863.1 |
| AD-63308.1 | GCCCUCUGGUGCGAGCUGAdTdT | 718 | A-126864.1 | 33-51 | UCAGCUCGCACCAGAGGGCdTdT | 1052 | A-126865.1 |
| AD-63314.1 | GGUGCGAGCUGACCUGAGAdTdT | 719 | A-126866.1 | 40-58 | UCUCAGGUCAGCUCGCACCdTdT | 1053 | A-126867.1 |
| AD-63320.1 | UGACCUGAGAUGCACUUCCdTdT | 720 | A-126868.1 | 49-67 | GGAAGUGCAUCUCAGGUCAdTdT | 1054 | A-126869.1 |
| AD-63326.1 | UGCACUUCCCUCCUCUGUGdTdT | 721 | A-126870.1 | 59-77 | CACAGAGGAGGGAAGUGCAdTdT | 1055 | A-126871.1 |
| AD-63332.1 | CUGUGAGCUGUCUCGGCACdTdT | 722 | A-126872.1 | 73-91 | GUGCCGAGACAGCUCACAGdTdT | 1056 | A-126873.1 |
| AD-63291.1 | GUCUCGGCACCCACUUGCAdTdT | 723 | A-126874.1 | 82-100 | UGCAAGUGGGUGCCGAGACdTdT | 1057 | A-126875.1 |
| AD-63297.1 | CCACUUGCAGUCACUGCCGdTdT | 724 | A-126876.1 | 92-110 | CGGCAGUGACUGCAAGUGGdTdT | 1058 | A-126877.1 |
| AD-63303.1 | GUCACUGCCGCCUGAUGUUdTdT | 725 | A-126878.1 | 101-119 | AACAUCAGGCGGCAGUGACdTdT | 1059 | A-126879.1 |
| AD-63309.1 | GCCUGAUGUUGUUACUCUUdTdT | 726 | A-126880.1 | 110-128 | AAGAGUAACAACAUCAGGCdTdT | 1060 | A-126881.1 |
| AD-63315.1 | UUACUCUUCCACUCCAAAAdTdT | 727 | A-126882.1 | 121-139 | UUUUGGAGUGGAAGAGUAAdTdT | 1061 | A-126883.1 |
| AD-63321.1 | ACUCCAAAAGGAUGCCCGUdTdT | 728 | A-126884.1 | 131-149 | ACGGGCAUCCUUUUGGAGUdTdT | 1062 | A-126885.1 |
| AD-63327.1 | UGCCCGUGGCCGAGGCCCCdTdT | 729 | A-126886.1 | 143-161 | GGGGCCUCGGCCACGGGCAdTdT | 1063 | A-126887.1 |
| AD-63333.1 | UGGCCGAGGCCCCCCAGGUdTdT | 730 | A-126888.1 | 149-167 | ACCUGGGGGGCCUCGGCCAdTdT | 1064 | A-126889.1 |
| AD-63292.1 | CCAGGUGGCUGGCGGGCAGdTdT | 731 | A-126890.1 | 162-180 | CUGCCCGCCAGCCACCUGGdTdT | 1065 | A-126891.1 |
| AD-63298.1 | GCGGGCAGGGGGACGGAGGdTdT | 732 | A-126892.1 | 173-191 | CCUCCGUCCCCCUGCCCGCdTdT | 1066 | A-126893.1 |
| AD-63304.1 | GGACGGAGGUGAUGGCGAGdTdT | 733 | A-126894.1 | 183-201 | CUCGCCAUCACCUCCGUCCdTdT | 1067 | A-126895.1 |
| AD-63310.1 | GUGAUGGCGAGGAAGCGGAdTdT | 734 | A-126896.1 | 191-209 | UCCGCUUCCUCGCCAUCACdTdT | 1068 | A-126897.1 |
| AD-63316.1 | GAAGCGGAGCCGGAGGGGAdTdT | 735 | A-126898.1 | 202-220 | UCCCCUCCGGCUCCGCUUCdTdT | 1069 | A-126899.1 |
| AD-63322.1 | GCCGGAGGGGAUGUUCAAGdTdT | 736 | A-126900.1 | 210-228 | CUUGAACAUCCCCUCCGGCdTdT | 1070 | A-126901.1 |
| AD-63328.1 | UGUUCAAGGCCUGUGAGGAdTdT | 737 | A-126902.1 | 221-239 | UCCUCACAGGCCUUGAACAdTdT | 1071 | A-126903.1 |
| AD-63334.1 | CUGUGAGGACUCCAAGAGAdTdT | 738 | A-126904.1 | 231-249 | UCUCUUGGAGUCCUCACAGdTdT | 1072 | A-126905.1 |
| AD-63293.1 | ACUCCAAGAGAAAAGCCCGdTdT | 739 | A-126906.1 | 239-257 | CGGGCUUUUCUCUUGGAGUdTdT | 1073 | A-126907.1 |
| AD-63299.1 | GCCCGGGGCUACCUCCGCCdTdT | 740 | A-126908.1 | 253-271 | GGCGGAGGUAGCCCCGGGCdTdT | 1074 | A-126909.1 |
| AD-63305.1 | ACCUCCGCCUGGUGCCCCUdTdT | 741 | A-126910.1 | 263-281 | AGGGGCACCAGGCGGAGGUdTdT | 1075 | A-126911.1 |
| AD-63311.1 | GCCUGGUGCCCCUGUUUGUdTdT | 742 | A-126912.1 | 269-287 | ACAAACAGGGGCACCAGGCdTdT | 1076 | A-126913.1 |
| AD-63317.1 | UGUUUGUGCUGCUGGCCCUdTdT | 743 | A-126914.1 | 281-299 | AGGGCCAGCAGCACAAACAdTdT | 1077 | A-126915.1 |
| AD-63323.1 | UGCUGGCCCUGCUCGUGCUdTdT | 744 | A-126916.1 | 290-308 | AGCACGAGCAGGGCCAGCAdTdT | 1078 | A-126917.1 |
| AD-63329.1 | GCUCGUGCUGGCUUCGGCGdTdT | 745 | A-126918.1 | 300-318 | CGCCGAAGCCAGCACGAGCdTdT | 1079 | A-126919.1 |
| AD-63335.1 | UCGGCGGGGGUGCUACUCUdTdT | 746 | A-126920.1 | 313-331 | AGAGUAGCACCCCCGCCGAdTdT | 1080 | A-126921.1 |
| AD-63294.1 | CGGCGGGGGUGCUACUCUGdTdT | 747 | A-126922.1 | 314-332 | CAGAGUAGCACCCCCGCCGdTdT | 1081 | A-126923.1 |
| AD-63300.1 | GGCGGGGGUGCUACUCUGGdTdT | 748 | A-126924.1 | 315-333 | CCAGAGUAGCACCCCCGCCdTdT | 1082 | A-126925.1 |
| AD-63306.1 | GCGGGGGUGCUACUCUGGUdTdT | 749 | A-126926.1 | 316-334 | ACCAGAGUAGCACCCCCGCdTdT | 1083 | A-126927.1 |
| AD-63312.1 | CGGGGGUGCUACUCUGGUAdTdT | 750 | A-126928.1 | 317-335 | UACCAGAGUAGCACCCCCGdTdT | 1084 | A-126929.1 |
| AD-63318.1 | GGGGGUGCUACUCUGGUAUdTdT | 751 | A-126930.1 | 318-336 | AUACCAGAGUAGCACCCCCdTdT | 1085 | A-126931.1 |
| AD-63324.1 | GGGUGCUACUCUGGUAUUUdTdT | 752 | A-126932.1 | 320-338 | AAAUACCAGAGUAGCACCCdTdT | 1086 | A-126933.1 |
| AD-63330.1 | GGUGCUACUCUGGUAUUUCdTdT | 753 | A-126934.1 | 321-339 | GAAAUACCAGAGUAGCACCdTdT | 1087 | A-126935.1 |
| AD-63336.1 | GUGCUACUCUGGUAUUUCCdTdT | 754 | A-126936.1 | 322-340 | GGAAAUACCAGAGUAGCACdTdT | 1088 | A-126937.1 |
| AD-63295.1 | GCUACUCUGGUAUUUCCUAdTdT | 755 | A-126938.1 | 324-342 | UAGGAAAUACCAGAGUAGCdTdT | 1089 | A-126939.1 |
| AD-63301.1 | CUACUCUGGUAUUUCCUAGdTdT | 756 | A-126940.1 | 325-343 | CUAGGAAAUACCAGAGUAGdTdT | 1090 | A-126941.1 |
| AD-63307.1 | UACUCUGGUAUUUCCUAGGdTdT | 757 | A-126942.1 | 326-344 | CCUAGGAAAUACCAGAGUAdTdT | 1091 | A-126943.1 |
| AD-63313.1 | ACUCUGGUAUUUCCUAGGGdTdT | 758 | A-126944.1 | 327-345 | CCCUAGGAAAUACCAGAGUdTdT | 1092 | A-126945.1 |
| AD-63319.1 | CUCUGGUAUUUCCUAGGGUdTdT | 759 | A-126946.1 | 328-346 | ACCCUAGGAAAUACCAGAGdTdT | 1093 | A-126947.1 |
| AD-63325.1 | CUGGUAUUUCCUAGGGUACdTdT | 760 | A-126948.1 | 330-348 | GUACCCUAGGAAAUACCAGdTdT | 1094 | A-126949.1 |
| AD-63331.1 | GUAUUUCCUAGGGUACAAGdTdT | 761 | A-126950.1 | 333-351 | CUUGUACCCUAGGAAAUACdTdT | 1095 | A-126951.1 |
| AD-63337.1 | UAUUUCCUAGGGUACAAGGdTdT | 762 | A-126952.1 | 334-352 | CCUUGUACCCUAGGAAAUAdTdT | 1096 | A-126953.1 |
| AD-63343.1 | AUUUCCUAGGGUACAAGGCdTdT | 763 | A-126954.1 | 335-353 | GCCUUGUACCCUAGGAAAUdTdT | 1097 | A-126955.1 |
| AD-63349.1 | UUUCCUAGGGUACAAGGCGdTdT | 764 | A-126956.1 | 336-354 | CGCCUUGUACCCUAGGAAAdTdT | 1098 | A-126957.1 |
| AD-63355.1 | UUCCUAGGGUACAAGGCGGdTdT | 765 | A-126958.1 | 337-355 | CCGCCUUGUACCCUAGGAAdTdT | 1099 | A-126959.1 |
| AD-63361.1 | CCUAGGGUACAAGGCGGAGdTdT | 766 | A-126960.1 | 339-357 | CUCCGCCUUGUACCCUAGGdTdT | 1100 | A-126961.1 |
| AD-63367.1 | CUAGGGUACAAGGCGGAGGdTdT | 767 | A-126962.1 | 340-358 | CCUCCGCCUUGUACCCUAGdTdT | 1101 | A-126963.1 |
| AD-63373.1 | UAGGGUACAAGGCGGAGGUdTdT | 768 | A-126964.1 | 341-359 | ACCUCCGCCUUGUACCCUAdTdT | 1102 | A-126965.1 |
| AD-63379.1 | AGGGUACAAGGCGGAGGUGdTdT | 769 | A-126966.1 | 342-360 | CACCUCCGCCUUGUACCCUdTdT | 1103 | A-126967.1 |
| AD-63338.1 | GGGUACAAGGCGGAGGUGAdTdT | 770 | A-126968.1 | 343-361 | UCACCUCCGCCUUGUACCCdTdT | 1104 | A-126969.1 |
| AD-63344.1 | GGUACAAGGCGGAGGUGAUdTdT | 771 | A-126970.1 | 344-362 | AUCACCUCCGCCUUGUACCdTdT | 1105 | A-126971.1 |
| AD-63350.1 | GUACAAGGCGGAGGUGAUGdTdT | 772 | A-126972.1 | 345-363 | CAUCACCUCCGCCUUGUACdTdT | 1106 | A-126973.1 |
| AD-63356.1 | UACAAGGCGGAGGUGAUGGdTdT | 773 | A-126974.1 | 346-364 | CCAUCACCUCCGCCUUGUAdTdT | 1107 | A-126975.1 |
| AD-63362.1 | ACAAGGCGGAGGUGAUGGUdTdT | 774 | A-126976.1 | 347-365 | ACCAUCACCUCCGCCUUGUdTdT | 1108 | A-126977.1 |
| AD-63368.1 | CAAGGCGGAGGUGAUGGUCdTdT | 775 | A-126978.1 | 348-366 | GACCAUCACCUCCGCCUUGdTdT | 1109 | A-126979.1 |
| AD-63374.1 | AAGGCGGAGGUGAUGGUCAdTdT | 776 | A-126980.1 | 349-367 | UGACCAUCACCUCCGCCUUdTdT | 1110 | A-126981.1 |
| AD-63380.1 | AGGCGGAGGUGAUGGUCAGdTdT | 777 | A-126982.1 | 350-368 | CUGACCAUCACCUCCGCCUdTdT | 1111 | A-126983.1 |
| AD-63339.1 | UGAUGGUCAGCCAGGUGUAdTdT | 778 | A-126984.1 | 359-377 | UACACCUGGCUGACCAUCAdTdT | 1112 | A-126985.1 |
| AD-63345.1 | CCAGGUGUACUCAGGCAGUdTdT | 779 | A-126986.1 | 369-387 | ACUGCCUGAGUACACCUGGdTdT | 1113 | A-126987.1 |
| AD-63351.1 | GCAGUCUGCGUGUACUCAAdTdT | 780 | A-126988.1 | 383-401 | UUGAGUACACGCAGACUGCdTdT | 1114 | A-126989.1 |
| AD-63357.1 | GCGUGUACUCAAUCGCCACdTdT | 781 | A-126990.1 | 390-408 | GUGGCGAUUGAGUACACGCdTdT | 1115 | A-126991.1 |
| AD-63363.1 | UCGCCACUUCUCCCAGGAUdTdT | 782 | A-126992.1 | 402-420 | AUCCUGGGAGAAGUGGCGAdTdT | 1116 | A-126993.1 |
| AD-63369.1 | CUCCCAGGAUCUUACCCGCdTdT | 783 | A-126994.1 | 411-429 | GCGGGUAAGAUCCUGGGAGdTdT | 1117 | A-126995.1 |
| AD-63375.1 | UACCCGCCGGGAAUCUAGUdTdT | 784 | A-126996.1 | 423-441 | ACUAGAUUCCCGGCGGGUAdTdT | 1118 | A-126997.1 |
| AD-63381.1 | CCGGGAAUCUAGUGCCUUCdTdT | 785 | A-126998.1 | 429-447 | GAAGGCACUAGAUUCCCGGdTdT | 1119 | A-126999.1 |
| AD-63340.1 | AGUGCCUUCCGCAGUGAAAdTdT | 786 | A-127000.1 | 439-457 | UUUCACUGCGGAAGGCACUdTdT | 1120 | A-127001.1 |
| AD-63346.1 | GUGAAACCGCCAAAGCCCAdTdT | 787 | A-127002.1 | 452-470 | UGGGCUUUGGCGGUUUCACdTdT | 1121 | A-127003.1 |
| AD-63352.1 | CGCCAAAGCCCAGAAGAUGdTdT | 788 | A-127004.1 | 459-477 | CAUCUUCUGGGCUUUGGCGdTdT | 1122 | A-127005.1 |
| AD-63358.1 | CAGAAGAUGCUCAAGGAGCdTdT | 789 | A-127006.1 | 469-487 | GCUCCUUGAGCAUCUUCUGdTdT | 1123 | A-127007.1 |
| AD-63364.1 | UCAAGGAGCUCAUCACCAGdTdT | 790 | A-127008.1 | 479-497 | CUGGUGAUGAGCUCCUUGAdTdT | 1124 | A-127009.1 |
| AD-63370.1 | ACCAGCACCCGCCUGGGAAdTdT | 791 | A-127010.1 | 493-511 | UUCCCAGGCGGGUGCUGGUdTdT | 1125 | A-127011.1 |
| AD-63376.1 | GCCUGGGAACUUACUACAAdTdT | 792 | A-127012.1 | 503-521 | UUGUAGUAAGUUCCCAGGCdTdT | 1126 | A-127013.1 |
| AD-63382.1 | GAACUUACUACAACUCCAGdTdT | 793 | A-127014.1 | 509-527 | CUGGAGUUGUAGUAAGUUCdTdT | 1127 | A-127015.1 |
| AD-63341.1 | AACUCCAGCUCCGUCUAUUdTdT | 794 | A-127016.1 | 520-538 | AAUAGACGGAGCUGGAGUUdTdT | 1128 | A-127017.1 |
| AD-63347.1 | CCGUCUAUUCCUUUGGGGAdTdT | 795 | A-127018.1 | 530-548 | UCCCCAAAGGAAUAGACGGdTdT | 1129 | A-127019.1 |
| AD-63353.1 | UUGGGGAGGGACCCCUCACdTdT | 796 | A-127020.1 | 542-560 | GUGAGGGGUCCCUCCCCAAdTdT | 1130 | A-127021.1 |
| AD-63359.1 | CCCCUCACCUGCUUCUUCUdTdT | 797 | A-127022.1 | 553-571 | AGAAGAAGCAGGUGAGGGGdTdT | 1131 | A-127023.1 |
| AD-63365.1 | CUGCUUCUUCUGGUUCAUUdTdT | 798 | A-127024.1 | 561-579 | AAUGAACCAGAAGAAGCAGdTdT | 1132 | A-127025.1 |
| AD-63371.1 | CUGGUUCAUUCUCCAAAUCdTdT | 799 | A-127026.1 | 570-588 | GAUUUGGAGAAUGAACCAGdTdT | 1133 | A-127027.1 |
| AD-63377.1 | UCUCCAAAUCCCCGAGCACdTdT | 800 | A-127028.1 | 579-597 | GUGCUCGGGGAUUUGGAGAdTdT | 1134 | A-127029.1 |
| AD-63383.1 | CCGAGCACCGCCGGCUGAUdTdT | 801 | A-127030.1 | 590-608 | AUCAGCCGGCGGUGCUCGGdTdT | 1135 | A-127031.1 |
| AD-63342.1 | GGCUGAUGCUGAGCCCCGAdTdT | 802 | A-127032.1 | 602-620 | UCGGGGCUCAGCAUCAGCCdTdT | 1136 | A-127033.1 |
| AD-63348.1 | UGAGCCCCGAGGUGGUGCAdTdT | 803 | A-127034.1 | 611-629 | UGCACCACCUCGGGGCUCAdTdT | 1137 | A-127035.1 |
| AD-63354.1 | UGGUGCAGGCACUGCUGGUdTdT | 804 | A-127036.1 | 623-641 | ACCAGCAGUGCCUGCACCAdTdT | 1138 | A-127037.1 |
| AD-63360.1 | AGGCACUGCUGGUGGAGGAdTdT | 805 | A-127038.1 | 629-647 | UCCUCCACCAGCAGUGCCUdTdT | 1139 | A-127039.1 |
| AD-63366.1 | GUGGAGGAGCUGCUGUCCAdTdT | 806 | A-127040.1 | 640-658 | UGGACAGCAGCUCCUCCACdTdT | 1140 | A-127041.1 |
| AD-63372.1 | UGUCCACAGUCAACAGCUCdTdT | 807 | A-127042.1 | 653-671 | GAGCUGUUGACUGUGGACAdTdT | 1141 | A-127043.1 |
| AD-63378.1 | UCAACAGCUCGGCUGCCGUdTdT | 808 | A-127044.1 | 662-680 | ACGGCAGCCGAGCUGUUGAdTdT | 1142 | A-127045.1 |
| AD-63384.1 | UCGGCUGCCGUCCCCUACAdTdT | 809 | A-127046.1 | 670-688 | UGUAGGGGACGGCAGCCGAdTdT | 1143 | A-127047.1 |
| AD-63390.1 | AGUGGACCCCGAGGGCCUAdTdT | 810 | A-127048.1 | 702-720 | UAGGCCCUCGGGGUCCACUdTdT | 1144 | A-127049.1 |
| AD-63396.1 | AGGGCCUAGUGAUCCUGGAdTdT | 811 | A-127050.1 | 713-731 | UCCAGGAUCACUAGGCCCUdTdT | 1145 | A-127051.1 |
| AD-63402.1 | UAGUGAUCCUGGAAGCCAGdTdT | 812 | A-127052.1 | 719-737 | CUGGCUUCCAGGAUCACUAdTdT | 1146 | A-127053.1 |
| AD-63408.1 | AAGCCAGUGUGAAAGACAUdTdT | 813 | A-127054.1 | 731-749 | AUGUCUUUCACACUGGCUUdTdT | 1147 | A-127055.1 |
| AD-63414.1 | UGAAAGACAUAGCUGCAUUdTdT | 814 | A-127056.1 | 740-758 | AAUGCAGCUAUGUCUUUCAdTdT | 1148 | A-127057.1 |
| AD-63420.1 | UGCAUUGAAUUCCACGCUGdTdT | 815 | A-127058.1 | 753-771 | CAGCGUGGAAUUCAAUGCAdTdT | 1149 | A-127059.1 |
| AD-63426.1 | CUACAGCUACGUGGGCCAGdTdT | 816 | A-127060.1 | 783-801 | CUGGCCCACGUAGCUGUAGdTdT | 1150 | A-127061.1 |
| AD-63385.1 | CUACGUGGGCCAGGGCCAGdTdT | 817 | A-127062.1 | 789-807 | CUGGCCCUGGCCCACGUAGdTdT | 1151 | A-127063.1 |
| AD-63391.1 | AGGGCCAGGUCCUCCGGCUdTdT | 818 | A-127064.1 | 800-818 | AGCCGGAGGACCUGGCCCUdTdT | 1152 | A-127065.1 |
| AD-63397.1 | CCGGCUGAAGGGGCCUGACdTdT | 819 | A-127066.1 | 813-831 | GUCAGGCCCCUUCAGCCGGdTdT | 1153 | A-127067.1 |
| AD-63403.1 | GGGCCUGACCACCUGGCCUdTdT | 820 | A-127068.1 | 823-841 | AGGCCAGGUGGUCAGGCCCdTdT | 1154 | A-127069.1 |
| AD-63409.1 | CCACCUGGCCUCCAGCUGCdTdT | 821 | A-127070.1 | 831-849 | GCAGCUGGAGGCCAGGUGGdTdT | 1155 | A-127071.1 |
| AD-63415.1 | CCAGCUGCCUGUGGCACCUdTdT | 822 | A-127072.1 | 842-860 | AGGUGCCACAGGCAGCUGGdTdT | 1156 | A-127073.1 |
| AD-63421.1 | CUGUGGCACCUGCAGGGCCdTdT | 823 | A-127074.1 | 850-868 | GGCCCUGCAGGUGCCACAGdTdT | 1157 | A-127075.1 |
| AD-63427.1 | CUGCAGGGCCCCAAGGACCdTdT | 824 | A-127076.1 | 859-877 | GGUCCUUGGGGCCCUGCAGdTdT | 1158 | A-127077.1 |
| AD-63386.1 | CCAAGGACCUCAUGCUCAAdTdT | 825 | A-127078.1 | 869-887 | UUGAGCAUGAGGUCCUUGGdTdT | 1159 | A-127079.1 |
| AD-63392.1 | UGCUCAAACUCCGGCUGGAdTdT | 826 | A-127080.1 | 881-899 | UCCAGCCGGAGUUUGAGCAdTdT | 1160 | A-127081.1 |
| AD-63398.1 | CCGGCUGGAGUGGACGCUGdTdT | 827 | A-127082.1 | 891-909 | CAGCGUCCACUCCAGCCGGdTdT | 1161 | A-127083.1 |
| AD-63404.1 | GACGCUGGCAGAGUGCCGGdTdT | 828 | A-127084.1 | 903-921 | CCGGCACUCUGCCAGCGUCdTdT | 1162 | A-127085.1 |
| AD-63410.1 | GGCAGAGUGCCGGGACCGAdTdT | 829 | A-127086.1 | 909-927 | UCGGUCCCGGCACUCUGCCdTdT | 1163 | A-127087.1 |
| AD-63416.1 | ACCGACUGGCCAUGUAUGAdTdT | 830 | A-127088.1 | 923-941 | UCAUACAUGGCCAGUCGGUdTdT | 1164 | A-127089.1 |
| AD-63422.1 | CCAUGUAUGACGUGGCCGGdTdT | 831 | A-127090.1 | 932-950 | CCGGCCACGUCAUACAUGGdTdT | 1165 | A-127091.1 |
| AD-63428.1 | GUGGCCGGGCCCCUGGAGAdTdT | 832 | A-127092.1 | 943-961 | UCUCCAGGGGCCCGGCCACdTdT | 1166 | A-127093.1 |
| AD-63387.1 | CCCUGGAGAAGAGGCUCAUdTdT | 833 | A-127094.1 | 953-971 | AUGAGCCUCUUCUCCAGGGdTdT | 1167 | A-127095.1 |
| AD-63393.1 | AGAAGAGGCUCAUCACCUCdTdT | 834 | A-127096.1 | 959-977 | GAGGUGAUGAGCCUCUUCUdTdT | 1168 | A-127097.1 |
| AD-63399.1 | ACCUCGGUGUACGGCUGCAdTdT | 835 | A-127098.1 | 973-991 | UGCAGCCGUACACCGAGGUdTdT | 1169 | A-127099.1 |
| AD-63405.1 | ACGGCUGCAGCCGCCAGGAdTdT | 836 | A-127100.1 | 983-1001 | UCCUGGCGGCUGCAGCCGUdTdT | 1170 | A-127101.1 |
| AD-63411.1 | GCCGCCAGGAGCCCGUGGUdTdT | 837 | A-127102.1 | 992-1010 | ACCACGGGCUCCUGGCGGCdTdT | 1171 | A-127103.1 |
| AD-63417.1 | AGCCCGUGGUGGAGGUUCUdTdT | 838 | A-127104.1 | 1001-1019 | AGAACCUCCACCACGGGCUdTdT | 1172 | A-127105.1 |
| AD-63423.1 | GUGGAGGUUCUGGCGUCGGdTdT | 839 | A-127106.1 | 1009-1027 | CCGACGCCAGAACCUCCACdTdT | 1173 | A-127107.1 |
| AD-63429.1 | UGGCGUCGGGGGCCAUCAUdTdT | 840 | A-127108.1 | 1019-1037 | AUGAUGGCCCCCGACGCCAdTdT | 1174 | A-127109.1 |
| AD-63388.1 | CCAUCAUGGCGGUCGUCUGdTdT | 841 | A-127110.1 | 1031-1049 | CAGACGACCGCCAUGAUGGdTdT | 1175 | A-127111.1 |
| AD-63394.1 | GCGGUCGUCUGGAAGAAGGdTdT | 842 | A-127112.1 | 1039-1057 | CCUUCUUCCAGACGACCGCdTdT | 1176 | A-127113.1 |
| AD-63400.1 | GGAAGAAGGGCCUGCACAGdTdT | 843 | A-127114.1 | 1049-1067 | CUGUGCAGGCCCUUCUUCCdTdT | 1177 | A-127115.1 |
| AD-63406.1 | CCUGCACAGCUACUACGACdTdT | 844 | A-127116.1 | 1059-1077 | GUCGUAGUAGCUGUGCAGGdTdT | 1178 | A-127117.1 |
| AD-63412.1 | ACUACGACCCCUUCGUGCUdTdT | 845 | A-127118.1 | 1070-1088 | AGCACGAAGGGGUCGUAGUdTdT | 1179 | A-127119.1 |
| AD-63418.1 | CCUUCGUGCUCUCCGUGCAdTdT | 846 | A-127120.1 | 1079-1097 | UGCACGGAGAGCACGAAGGdTdT | 1180 | A-127121.1 |
| AD-63424.1 | CCGUGCAGCCGGUGGUCUUdTdT | 847 | A-127122.1 | 1091-1109 | AAGACCACCGGCUGCACGGdTdT | 1181 | A-127123.1 |
| AD-63430.1 | CGGUGGUCUUCCAGGCCUGdTdT | 848 | A-127124.1 | 1100-1118 | CAGGCCUGGAAGACCACCGdTdT | 1182 | A-127125.1 |
| AD-63389.1 | AGGCCUGUGAAGUGAACCUdTdT | 849 | A-127126.1 | 1112-1130 | AGGUUCACUUCACAGGCCUdTdT | 1183 | A-127127.1 |
| AD-63395.1 | AAGUGAACCUGACGCUGGAdTdT | 850 | A-127128.1 | 1121-1139 | UCCAGCGUCAGGUUCACUUdTdT | 1184 | A-127129.1 |
| AD-63401.1 | GACGCUGGACAACAGGCUCdTdT | 851 | A-127130.1 | 1131-1149 | GAGCCUGUUGUCCAGCGUCdTdT | 1185 | A-127131.1 |
| AD-63407.1 | ACAACAGGCUCGACUCCCAdTdT | 852 | A-127132.1 | 1139-1157 | UGGGAGUCGAGCCUGUUGUdTdT | 1186 | A-127133.1 |
| AD-63413.1 | ACUCCCAGGGCGUCCUCAGdTdT | 853 | A-127134.1 | 1151-1169 | CUGAGGACGCCCUGGGAGUdTdT | 1187 | A-127135.1 |
| AD-63419.1 | CCCCGUACUUCCCCAGCUAdTdT | 854 | A-127136.1 | 1172-1190 | UAGCUGGGGAAGUACGGGGdTdT | 1188 | A-127137.1 |
| AD-63425.1 | UUCCCCAGCUACUACUCGCdTdT | 855 | A-127138.1 | 1180-1198 | GCGAGUAGUAGCUGGGGAAdTdT | 1189 | A-127139.1 |
| AD-63431.1 | ACUACUCGCCCCAAACCCAdTdT | 856 | A-127140.1 | 1190-1208 | UGGGUUUGGGGCGAGUAGUdTdT | 1190 | A-127141.1 |
| AD-63437.1 | CCCAAACCCACUGCUCCUGdTdT | 857 | A-127142.1 | 1199-1217 | CAGGAGCAGUGGGUUUGGGdTdT | 1191 | A-127143.1 |
| AD-63443.1 | GCUCCUGGCACCUCACGGUdTdT | 858 | A-127144.1 | 1211-1229 | ACCGUGAGGUGCCAGGAGCdTdT | 1192 | A-127145.1 |
| AD-63449.1 | ACCUCACGGUGCCCUCUCUdTdT | 859 | A-127146.1 | 1220-1238 | AGAGAGGGCACCGUGAGGUdTdT | 1193 | A-127147.1 |
| AD-63455.1 | CUCUCUGGACUACGGCUUGdTdT | 860 | A-127148.1 | 1233-1251 | CAAGCCGUAGUCCAGAGAGdTdT | 1194 | A-127149.1 |
| AD-63461.1 | GACUACGGCUUGGCCCUCUdTdT | 861 | A-127150.1 | 1240-1258 | AGAGGGCCAAGCCGUAGUCdTdT | 1195 | A-127151.1 |
| AD-63467.1 | CCCUCUGGUUUGAUGCCUAdTdT | 862 | A-127152.1 | 1253-1271 | UAGGCAUCAAACCAGAGGGdTdT | 1196 | A-127153.1 |
| AD-63473.1 | GUUUGAUGCCUAUGCACUGdTdT | 863 | A-127154.1 | 1260-1278 | CAGUGCAUAGGCAUCAAACdTdT | 1197 | A-127155.1 |
| AD-63432.1 | GCACUGAGGAGGCAGAAGUdTdT | 864 | A-127156.1 | 1273-1291 | ACUUCUGCCUCCUCAGUGCdTdT | 1198 | A-127157.1 |
| AD-63438.1 | GGAGGCAGAAGUAUGAUUUdTdT | 865 | A-127158.1 | 1280-1298 | AAAUCAUACUUCUGCCUCCdTdT | 1199 | A-127159.1 |
| AD-63444.1 | AUGAUUUGCCGUGCACCCAdTdT | 866 | A-127160.1 | 1292-1310 | UGGGUGCACGGCAAAUCAUdTdT | 1200 | A-127161.1 |
| AD-63450.1 | UGCACCCAGGGCCAGUGGAdTdT | 867 | A-127162.1 | 1303-1321 | UCCACUGGCCCUGGGUGCAdTdT | 1201 | A-127163.1 |
| AD-63456.1 | GCCAGUGGACGAUCCAGAAdTdT | 868 | A-127164.1 | 1313-1331 | UUCUGGAUCGUCCACUGGCdTdT | 1202 | A-127165.1 |
| AD-63462.1 | GGACGAUCCAGAACAGGAGdTdT | 869 | A-127166.1 | 1319-1337 | CUCCUGUUCUGGAUCGUCCdTdT | 1203 | A-127167.1 |
| AD-63468.1 | ACAGGAGGCUGUGUGGCUUdTdT | 870 | A-127168.1 | 1331-1349 | AAGCCACACAGCCUCCUGUdTdT | 1204 | A-127169.1 |
| AD-63474.1 | CUGUGUGGCUUGCGCAUCCdTdT | 871 | A-127170.1 | 1339-1357 | GGAUGCGCAAGCCACACAGdTdT | 1205 | A-127171.1 |
| AD-63433.1 | UGCGCAUCCUGCAGCCCUAdTdT | 872 | A-127172.1 | 1349-1367 | UAGGGCUGCAGGAUGCGCAdTdT | 1206 | A-127173.1 |
| AD-63439.1 | AGCCCUACGCCGAGAGGAUdTdT | 873 | A-127174.1 | 1361-1379 | AUCCUCUCGGCGUAGGGCUdTdT | 1207 | A-127175.1 |
| AD-63445.1 | CCGAGAGGAUCCCCGUGGUdTdT | 874 | A-127176.1 | 1370-1388 | ACCACGGGGAUCCUCUCGGdTdT | 1208 | A-127177.1 |
| AD-63451.1 | CCGUGGUGGCCACGGCCGGdTdT | 875 | A-127178.1 | 1382-1400 | CCGGCCGUGGCCACCACGGdTdT | 1209 | A-127179.1 |
| AD-63457.1 | CCACGGCCGGGAUCACCAUdTdT | 876 | A-127180.1 | 1391-1409 | AUGGUGAUCCCGGCCGUGGdTdT | 1210 | A-127181.1 |
| AD-63463.1 | GGAUCACCAUCAACUUCACdTdT | 877 | A-127182.1 | 1400-1418 | GUGAAGUUGAUGGUGAUCCdTdT | 1211 | A-127183.1 |
| AD-63469.1 | UCAACUUCACCUCCCAGAUdTdT | 878 | A-127184.1 | 1409-1427 | AUCUGGGAGGUGAAGUUGAdTdT | 1212 | A-127185.1 |
| AD-63475.1 | CCCAGAUCUCCCUCACCGGdTdT | 879 | A-127186.1 | 1421-1439 | CCGGUGAGGGAGAUCUGGGdTdT | 1213 | A-127187.1 |
| AD-63434.1 | CCCUCACCGGGCCCGGUGUdTdT | 880 | A-127188.1 | 1430-1448 | ACACCGGGCCCGGUGAGGGdTdT | 1214 | A-127189.1 |
| AD-63440.1 | CCCGGUGUGCGGGUGCACUdTdT | 881 | A-127190.1 | 1441-1459 | AGUGCACCCGCACACCGGGdTdT | 1215 | A-127191.1 |
| AD-63446.1 | GCUUGUACAACCAGUCGGAdTdT | 882 | A-127192.1 | 1463-1481 | UCCGACUGGUUGUACAAGCdTdT | 1216 | A-127193.1 |
| AD-63452.1 | ACAACCAGUCGGACCCCUGdTdT | 883 | A-127194.1 | 1469-1487 | CAGGGGUCCGACUGGUUGUdTdT | 1217 | A-127195.1 |
| AD-63458.1 | ACCCCUGCCCUGGAGAGUUdTdT | 884 | A-127196.1 | 1481-1499 | AACUCUCCAGGGCAGGGGUdTdT | 1218 | A-127197.1 |
| AD-63464.1 | CCUGGAGAGUUCCUCUGUUdTdT | 885 | A-127198.1 | 1489-1507 | AACAGAGGAACUCUCCAGGdTdT | 1219 | A-127199.1 |
| AD-63470.1 | UCUGUUCUGUGAAUGGACUdTdT | 886 | A-127200.1 | 1502-1520 | AGUCCAUUCACAGAACAGAdTdT | 1220 | A-127201.1 |
| AD-63476.1 | GAAUGGACUCUGUGUCCCUdTdT | 887 | A-127202.1 | 1512-1530 | AGGGACACAGAGUCCAUUCdTdT | 1221 | A-127203.1 |
| AD-63435.1 | CUGUGUCCCUGCCUGUGAUdTdT | 888 | A-127204.1 | 1521-1539 | AUCACAGGCAGGGACACAGdTdT | 1222 | A-127205.1 |
| AD-63441.1 | CUGCCUGUGAUGGGGUCAAdTdT | 889 | A-127206.1 | 1529-1547 | UUGACCCCAUCACAGGCAGdTdT | 1223 | A-127207.1 |
| AD-63447.1 | GGUCAAGGACUGCCCCAACdTdT | 890 | A-127208.1 | 1542-1560 | GUUGGGGCAGUCCUUGACCdTdT | 1224 | A-127209.1 |
| AD-63453.1 | UGCCCCAACGGCCUGGAUGdTdT | 891 | A-127210.1 | 1552-1570 | CAUCCAGGCCGUUGGGGCAdTdT | 1225 | A-127211.1 |
| AD-63459.1 | CGGCCUGGAUGAGAGAAACdTdT | 892 | A-127212.1 | 1560-1578 | GUUUCUCUCAUCCAGGCCGdTdT | 1226 | A-127213.1 |
| AD-63465.1 | GAGAGAAACUGCGUUUGCAdTdT | 893 | A-127214.1 | 1570-1588 | UGCAAACGCAGUUUCUCUCdTdT | 1227 | A-127215.1 |
| AD-63471.1 | UUUGCAGAGCCACAUUCCAdTdT | 894 | A-127216.1 | 1583-1601 | UGGAAUGUGGCUCUGCAAAdTdT | 1228 | A-127217.1 |
| AD-63477.1 | GCCACAUUCCAGUGCAAAGdTdT | 895 | A-127218.1 | 1591-1609 | CUUUGCACUGGAAUGUGGCdTdT | 1229 | A-127219.1 |
| AD-63436.1 | GUGCAAAGAGGACAGCACAdTdT | 896 | A-127220.1 | 1602-1620 | UGUGCUGUCCUCUUUGCACdTdT | 1230 | A-127221.1 |
| AD-63442.1 | GAGGACAGCACAUGCAUCUdTdT | 897 | A-127222.1 | 1609-1627 | AGAUGCAUGUGCUGUCCUCdTdT | 1231 | A-127223.1 |
| AD-63448.1 | GCAUCUCACUGCCCAAGGUdTdT | 898 | A-127224.1 | 1622-1640 | ACCUUGGGCAGUGAGAUGCdTdT | 1232 | A-127225.1 |
| AD-63454.1 | GCCCAAGGUCUGUGAUGGGdTdT | 899 | A-127226.1 | 1632-1650 | CCCAUCACAGACCUUGGGCdTdT | 1233 | A-127227.1 |
| AD-63460.1 | UGUGAUGGGCAGCCUGAUUdTdT | 900 | A-127228.1 | 1642-1660 | AAUCAGGCUGCCCAUCACAdTdT | 1234 | A-127229.1 |
| AD-63466.1 | GCAGCCUGAUUGUCUCAACdTdT | 901 | A-127230.1 | 1650-1668 | GUUGAGACAAUCAGGCUGCdTdT | 1235 | A-127231.1 |
| AD-63472.1 | GUCUCAACGGCAGCGACGAdTdT | 902 | A-127232.1 | 1661-1679 | UCGUCGCUGCCGUUGAGACdTdT | 1236 | A-127233.1 |
| AD-63478.1 | GCGACGAAGAGCAGUGCCAdTdT | 903 | A-127234.1 | 1673-1691 | UGGCACUGCUCUUCGUCGCdTdT | 1237 | A-127235.1 |
| AD-63484.1 | AGCAGUGCCAGGAAGGGGUdTdT | 904 | A-127236.1 | 1682-1700 | ACCCCUUCCUGGCACUGCUdTdT | 1238 | A-127237.1 |
| AD-63490.1 | GAAGGGGUGCCAUGUGGGAdTdT | 905 | A-127238.1 | 1693-1711 | UCCCACAUGGCACCCCUUCdTdT | 1239 | A-127239.1 |
| AD-63496.1 | CCAUGUGGGACAUUCACCUdTdT | 906 | A-127240.1 | 1702-1720 | AGGUGAAUGUCCCACAUGGdTdT | 1240 | A-127241.1 |
| AD-63502.1 | CAUUCACCUUCCAGUGUGAdTdT | 907 | A-127242.1 | 1712-1730 | UCACACUGGAAGGUGAAUGdTdT | 1241 | A-127243.1 |
| AD-63508.1 | CAGUGUGAGGACCGGAGCUdTdT | 908 | A-127244.1 | 1723-1741 | AGCUCCGGUCCUCACACUGdTdT | 1242 | A-127245.1 |
| AD-63514.1 | GACCGGAGCUGCGUGAAGAdTdT | 909 | A-127246.1 | 1732-1750 | UCUUCACGCAGCUCCGGUCdTdT | 1243 | A-127247.1 |
| AD-63520.1 | CUGCGUGAAGAAGCCCAACdTdT | 910 | A-127248.1 | 1740-1758 | GUUGGGCUUCUUCACGCAGdTdT | 1244 | A-127249.1 |
| AD-63479.1 | AGCCCAACCCGCAGUGUGAdTdT | 911 | A-127250.1 | 1751-1769 | UCACACUGCGGGUUGGGCUdTdT | 1245 | A-127251.1 |
| AD-63485.1 | CAGUGUGAUGGGCGGCCCGdTdT | 912 | A-127252.1 | 1762-1780 | CGGGCCGCCCAUCACACUGdTdT | 1246 | A-127253.1 |
| AD-63491.1 | GCGGCCCGACUGCAGGGACdTdT | 913 | A-127254.1 | 1773-1791 | GUCCCUGCAGUCGGGCCGCdTdT | 1247 | A-127255.1 |
| AD-63497.1 | CUGCAGGGACGGCUCGGAUdTdT | 914 | A-127256.1 | 1782-1800 | AUCCGAGCCGUCCCUGCAGdTdT | 1248 | A-127257.1 |
| AD-63503.1 | ACGGCUCGGAUGAGGAGCAdTdT | 915 | A-127258.1 | 1790-1808 | UGCUCCUCAUCCGAGCCGUdTdT | 1249 | A-127259.1 |
| AD-63509.1 | UGAGGAGCACUGUGACUGUdTdT | 916 | A-127260.1 | 1800-1818 | ACAGUCACAGUGCUCCUCAdTdT | 1250 | A-127261.1 |
| AD-63515.1 | CUGUGACUGUGGCCUCCAGdTdT | 917 | A-127262.1 | 1809-1827 | CUGGAGGCCACAGUCACAGdTdT | 1251 | A-127263.1 |
| AD-63521.1 | GCCUCCAGGGCCCCUCCAGdTdT | 918 | A-127264.1 | 1820-1838 | CUGGAGGGGCCCUGGAGGCdTdT | 1252 | A-127265.1 |
| AD-63480.1 | CCCCUCCAGCCGCAUUGUUdTdT | 919 | A-127266.1 | 1830-1848 | AACAAUGCGGCUGGAGGGGdTdT | 1253 | A-127267.1 |
| AD-63486.1 | CCGCAUUGUUGGUGGAGCUdTdT | 920 | A-127268.1 | 1839-1857 | AGCUCCACCAACAAUGCGGdTdT | 1254 | A-127269.1 |
| AD-63492.1 | GUGGAGCUGUGUCCUCCGAdTdT | 921 | A-127270.1 | 1850-1868 | UCGGAGGACACAGCUCCACdTdT | 1255 | A-127271.1 |
| AD-63498.1 | CUCCGAGGGUGAGUGGCCAdTdT | 922 | A-127272.1 | 1863-1881 | UGGCCACUCACCCUCGGAGdTdT | 1256 | A-127273.1 |
| AD-63504.1 | GGGUGAGUGGCCAUGGCAGdTdT | 923 | A-127274.1 | 1869-1887 | CUGCCAUGGCCACUCACCCdTdT | 1257 | A-127275.1 |
| AD-63510.1 | AUGGCAGGCCAGCCUCCAGdTdT | 924 | A-127276.1 | 1881-1899 | CUGGAGGCUGGCCUGCCAUdTdT | 1258 | A-127277.1 |
| AD-63516.1 | CCUCCAGGUUCGGGGUCGAdTdT | 925 | A-127278.1 | 1893-1911 | UCGACCCCGAACCUGGAGGdTdT | 1259 | A-127279.1 |
| AD-63522.1 | GGUUCGGGGUCGACACAUCdTdT | 926 | A-127280.1 | 1899-1917 | GAUGUGUCGACCCCGAACCdTdT | 1260 | A-127281.1 |
| AD-63481.1 | ACAUCUGUGGGGGGGCCCUdTdT | 927 | A-127282.1 | 1913-1931 | AGGGCCCCCCCACAGAUGUdTdT | 1261 | A-127283.1 |
| AD-63487.1 | GUGGGGGGGCCCUCAUCGCdTdT | 928 | A-127284.1 | 1919-1937 | GCGAUGAGGGCCCCCCCACdTdT | 1262 | A-127285.1 |
| AD-63493.1 | AUCGCUGACCGCUGGGUGAdTdT | 929 | A-127286.1 | 1933-1951 | UCACCCAGCGGUCAGCGAUdTdT | 1263 | A-127287.1 |
| AD-63499.1 | ACCGCUGGGUGAUAACAGCdTdT | 930 | A-127288.1 | 1940-1958 | GCUGUUAUCACCCAGCGGUdTdT | 1264 | A-127289.1 |
| AD-63505.1 | UGAUAACAGCUGCCCACUGdTdT | 931 | A-127290.1 | 1949-1967 | CAGUGGGCAGCUGUUAUCAdTdT | 1265 | A-127291.1 |
| AD-63511.1 | CCCACUGCUUCCAGGAGGAdTdT | 932 | A-127292.1 | 1961-1979 | UCCUCCUGGAAGCAGUGGGdTdT | 1266 | A-127293.1 |
| AD-63517.1 | CCAGGAGGACAGCAUGGCCdTdT | 933 | A-127294.1 | 1971-1989 | GGCCAUGCUGUCCUCCUGGdTdT | 1267 | A-127295.1 |
| AD-63523.1 | ACAGCAUGGCCUCCACGGUdTdT | 934 | A-127296.1 | 1979-1997 | ACCGUGGAGGCCAUGCUGUdTdT | 1268 | A-127297.1 |
| AD-63482.1 | CCACGGUGCUGUGGACCGUdTdT | 935 | A-127298.1 | 1991-2009 | ACGGUCCACAGCACCGUGGdTdT | 1269 | A-127299.1 |
| AD-63488.1 | GGACCGUGUUCCUGGGCAAdTdT | 936 | A-127300.1 | 2003-2021 | UUGCCCAGGAACACGGUCCdTdT | 1270 | A-127301.1 |
| AD-63494.1 | UCCUGGGCAAGGUGUGGCAdTdT | 937 | A-127302.1 | 2012-2030 | UGCCACACCUUGCCCAGGAdTdT | 1271 | A-127303.1 |
| AD-63500.1 | GUGUGGCAGAACUCGCGCUdTdT | 938 | A-127304.1 | 2023-2041 | AGCGCGAGUUCUGCCACACdTdT | 1272 | A-127305.1 |
| AD-63506.1 | GAACUCGCGCUGGCCUGGAdTdT | 939 | A-127306.1 | 2031-2049 | UCCAGGCCAGCGCGAGUUCdTdT | 1273 | A-127307.1 |
| AD-63512.1 | GGCCUGGAGAGGUGUCCUUdTdT | 940 | A-127308.1 | 2042-2060 | AAGGACACCUCUCCAGGCCdTdT | 1274 | A-127309.1 |
| AD-63518.1 | AGGUGUCCUUCAAGGUGAGdTdT | 941 | A-127310.1 | 2051-2069 | CUCACCUUGAAGGACACCUdTdT | 1275 | A-127311.1 |
| AD-63524.1 | CAAGGUGAGCCGCCUGCUCdTdT | 942 | A-127312.1 | 2061-2079 | GAGCAGGCGGCUCACCUUGdTdT | 1276 | A-127313.1 |
| AD-63483.1 | GCCUGCUCCUGCACCCGUAdTdT | 943 | A-127314.1 | 2072-2090 | UACGGGUGCAGGAGCAGGCdTdT | 1277 | A-127315.1 |
| AD-63489.1 | GCACCCGUACCACGAAGAGdTdT | 944 | A-127316.1 | 2082-2100 | CUCUUCGUGGUACGGGUGCdTdT | 1278 | A-127317.1 |
| AD-63495.1 | CCACGAAGAGGACAGCCAUdTdT | 945 | A-127318.1 | 2091-2109 | AUGGCUGUCCUCUUCGUGGdTdT | 1279 | A-127319.1 |
| AD-63501.1 | AGGACAGCCAUGACUACGAdTdT | 946 | A-127320.1 | 2099-2117 | UCGUAGUCAUGGCUGUCCUdTdT | 1280 | A-127321.1 |
| AD-63507.1 | ACUACGACGUGGCGCUGCUdTdT | 947 | A-127322.1 | 2111-2129 | AGCAGCGCCACGUCGUAGUdTdT | 1281 | A-127323.1 |
| AD-63513.1 | UGGCGCUGCUGCAGCUCGAdTdT | 948 | A-127324.1 | 2120-2138 | UCGAGCUGCAGCAGCGCCAdTdT | 1282 | A-127325.1 |
| AD-63519.1 | AGCUCGACCACCCGGUGGUdTdT | 949 | A-127326.1 | 2132-2150 | ACCACCGGGUGGUCGAGCUdTdT | 1283 | A-127327.1 |
| AD-63525.1 | CCGGUGGUGCGCUCGGCCGdTdT | 950 | A-127328.1 | 2143-2161 | CGGCCGAGCGCACCACCGGdTdT | 1284 | A-127329.1 |
| AD-63531.1 | UGCGCUCGGCCGCCGUGCGdTdT | 951 | A-127330.1 | 2150-2168 | CGCACGGCGGCCGAGCGCAdTdT | 1285 | A-127331.1 |
| AD-63537.1 | CCGUGCGCCCCGUCUGCCUdTdT | 952 | A-127332.1 | 2162-2180 | AGGCAGACGGGGCGCACGGdTdT | 1286 | A-127333.1 |
| AD-63543.1 | CCGUCUGCCUGCCCGCGCGdTdT | 953 | A-127334.1 | 2171-2189 | CGCGCGGGCAGGCAGACGGdTdT | 1287 | A-127335.1 |
| AD-63549.1 | CCGCGCGCUCCCACUUCUUdTdT | 954 | A-127336.1 | 2183-2201 | AAGAAGUGGGAGCGCGCGGdTdT | 1288 | A-127337.1 |
| AD-63555.1 | CCCACUUCUUCGAGCCCGGdTdT | 955 | A-127338.1 | 2192-2210 | CCGGGCUCGAAGAAGUGGGdTdT | 1289 | A-127339.1 |
| AD-63561.1 | GAGCCCGGCCUGCACUGCUdTdT | 956 | A-127340.1 | 2203-2221 | AGCAGUGCAGGCCGGGCUCdTdT | 1290 | A-127341.1 |
| AD-63567.1 | GGCCUGCACUGCUGGAUUAdTdT | 957 | A-127342.1 | 2209-2227 | UAAUCCAGCAGUGCAGGCCdTdT | 1291 | A-127343.1 |
| AD-63526.1 | UGGAUUACGGGCUGGGGCGdTdT | 958 | A-127344.1 | 2221-2239 | CGCCCCAGCCCGUAAUCCAdTdT | 1292 | A-127345.1 |
| AD-63532.1 | GCUGGGGCGCCUUGCGCGAdTdT | 959 | A-127346.1 | 2231-2249 | UCGCGCAAGGCGCCCCAGCdTdT | 1293 | A-127347.1 |
| AD-63538.1 | UGCGCGAGGGCGGCCCCAUdTdT | 960 | A-127348.1 | 2243-2261 | AUGGGGCCGCCCUCGCGCAdTdT | 1294 | A-127349.1 |
| AD-63544.1 | AGGGCGGCCCCAUCAGCAAdTdT | 961 | A-127350.1 | 2249-2267 | UUGCUGAUGGGGCCGCCCUdTdT | 1295 | A-127351.1 |
| AD-63550.1 | UCAGCAACGCUCUGCAGAAdTdT | 962 | A-127352.1 | 2261-2279 | UUCUGCAGAGCGUUGCUGAdTdT | 1296 | A-127353.1 |
| AD-63556.1 | UGCAGAAAGUGGAUGUGCAdTdT | 963 | A-127354.1 | 2273-2291 | UGCACAUCCACUUUCUGCAdTdT | 1297 | A-127355.1 |
| AD-63562.1 | AAGUGGAUGUGCAGUUGAUdTdT | 964 | A-127356.1 | 2279-2297 | AUCAACUGCACAUCCACUUdTdT | 1298 | A-127357.1 |
| AD-63568.1 | GCAGUUGAUCCCACAGGACdTdT | 965 | A-127358.1 | 2289-2307 | GUCCUGUGGGAUCAACUGCdTdT | 1299 | A-127359.1 |
| AD-63527.1 | CACAGGACCUGUGCAGCGAdTdT | 966 | A-127360.1 | 2300-2318 | UCGCUGCACAGGUCCUGUGdTdT | 1300 | A-127361.1 |
| AD-63533.1 | GCAGCGAGGUCUAUCGCUAdTdT | 967 | A-127362.1 | 2312-2330 | UAGCGAUAGACCUCGCUGCdTdT | 1301 | A-127363.1 |
| AD-63539.1 | GUCUAUCGCUACCAGGUGAdTdT | 968 | A-127364.1 | 2320-2338 | UCACCUGGUAGCGAUAGACdTdT | 1302 | A-127365.1 |
| AD-63545.1 | CCAGGUGACGCCACGCAUGdTdT | 969 | A-127366.1 | 2331-2349 | CAUGCGUGGCGUCACCUGGdTdT | 1303 | A-127367.1 |
| AD-63551.1 | CCACGCAUGCUGUGUGCCGdTdT | 970 | A-127368.1 | 2341-2359 | CGGCACACAGCAUGCGUGGdTdT | 1304 | A-127369.1 |
| AD-63557.1 | CUGUGUGCCGGCUACCGCAdTdT | 971 | A-127370.1 | 2350-2368 | UGCGGUAGCCGGCACACAGdTdT | 1305 | A-127371.1 |
| AD-63563.1 | ACCGCAAGGGCAAGAAGGAdTdT | 972 | A-127372.1 | 2363-2381 | UCCUUCUUGCCCUUGCGGUdTdT | 1306 | A-127373.1 |
| AD-63569.1 | GCAAGAAGGAUGCCUGUCAdTdT | 973 | A-127374.1 | 2372-2390 | UGACAGGCAUCCUUCUUGCdTdT | 1307 | A-127375.1 |
| AD-63528.1 | GCCUGUCAGGGUGACUCAGdTdT | 974 | A-127376.1 | 2383-2401 | CUGAGUCACCCUGACAGGCdTdT | 1308 | A-127377.1 |
| AD-63534.1 | GUGACUCAGGUGGUCCGCUdTdT | 975 | A-127378.1 | 2393-2411 | AGCGGACCACCUGAGUCACdTdT | 1309 | A-127379.1 |
| AD-63540.1 | GUGGUCCGCUGGUGUGCAAdTdT | 976 | A-127380.1 | 2402-2420 | UUGCACACCAGCGGACCACdTdT | 1310 | A-127381.1 |
| AD-63546.1 | UGGUGUGCAAGGCACUCAGdTdT | 977 | A-127382.1 | 2411-2429 | CUGAGUGCCUUGCACACCAdTdT | 1311 | A-127383.1 |
| AD-63552.1 | GCACUCAGUGGCCGCUGGUdTdT | 978 | A-127384.1 | 2422-2440 | ACCAGCGGCCACUGAGUGCdTdT | 1312 | A-127385.1 |
| AD-63558.1 | GCCGCUGGUUCCUGGCGGGdTdT | 979 | A-127386.1 | 2432-2450 | CCCGCCAGGAACCAGCGGCdTdT | 1313 | A-127387.1 |
| AD-63564.1 | UCCUGGCGGGGCUGGUCAGdTdT | 980 | A-127388.1 | 2441-2459 | CUGACCAGCCCCGCCAGGAdTdT | 1314 | A-127389.1 |
| AD-63570.1 | GCUGGUCAGCUGGGGCCUGdTdT | 981 | A-127390.1 | 2451-2469 | CAGGCCCCAGCUGACCAGCdTdT | 1315 | A-127391.1 |
| AD-63529.1 | GGGCCUGGGCUGUGGCCGGdTdT | 982 | A-127392.1 | 2463-2481 | CCGGCCACAGCCCAGGCCCdTdT | 1316 | A-127393.1 |
| AD-63535.1 | GGCUGUGGCCGGCCUAACUdTdT | 983 | A-127394.1 | 2470-2488 | AGUUAGGCCGGCCACAGCCdTdT | 1317 | A-127395.1 |
| AD-63541.1 | CUAACUACUUCGGCGUCUAdTdT | 984 | A-127396.1 | 2483-2501 | UAGACGCCGAAGUAGUUAGdTdT | 1318 | A-127397.1 |
| AD-63547.1 | CGGCGUCUACACCCGCAUCdTdT | 985 | A-127398.1 | 2493-2511 | GAUGCGGGUGUAGACGCCGdTdT | 1319 | A-127399.1 |
| AD-63553.1 | ACACCCGCAUCACAGGUGUdTdT | 986 | A-127400.1 | 2501-2519 | ACACCUGUGAUGCGGGUGUdTdT | 1320 | A-127401.1 |
| AD-63559.1 | ACAGGUGUGAUCAGCUGGAdTdT | 987 | A-127402.1 | 2512-2530 | UCCAGCUGAUCACACCUGUdTdT | 1321 | A-127403.1 |
| AD-63565.1 | UCAGCUGGAUCCAGCAAGUdTdT | 988 | A-127404.1 | 2522-2540 | ACUUGCUGGAUCCAGCUGAdTdT | 1322 | A-127405.1 |
| AD-63571.1 | CAGCAAGUGGUGACCUGAGdTdT | 989 | A-127406.1 | 2533-2551 | CUCAGGUCACCACUUGCUGdTdT | 1323 | A-127407.1 |
| AD-63530.1 | UGACCUGAGGAACUGCCCCdTdT | 990 | A-127408.1 | 2543-2561 | GGGGCAGUUCCUCAGGUCAdTdT | 1324 | A-127409.1 |
| AD-63536.1 | GGAACUGCCCCCCUGCAAAdTdT | 991 | A-127410.1 | 2551-2569 | UUUGCAGGGGGGCAGUUCCdTdT | 1325 | A-127411.1 |
| AD-63542.1 | CUGCAAAGCAGGGCCCACCdTdT | 992 | A-127412.1 | 2563-2581 | GGUGGGCCCUGCUUUGCAGdTdT | 1326 | A-127413.1 |
| AD-63548.1 | GCAGGGCCCACCUCCUGGAdTdT | 993 | A-127414.1 | 2570-2588 | UCCAGGAGGUGGGCCCUGCdTdT | 1327 | A-127415.1 |
| AD-63554.1 | CCUCCUGGACUCAGAGAGCdTdT | 994 | A-127416.1 | 2580-2598 | GCUCUCUGAGUCCAGGAGGdTdT | 1328 | A-127417.1 |
| AD-63560.1 | CUCAGAGAGCCCAGGGCAAdTdT | 995 | A-127418.1 | 2589-2607 | UUGCCCUGGGCUCUCUGAGdTdT | 1329 | A-127419.1 |
| AD-63566.1 | CCAGGGCAACUGCCAAGCAdTdT | 996 | A-127420.1 | 2599-2617 | UGCUUGGCAGUUGCCCUGGdTdT | 1330 | A-127421.1 |
| AD-63572.1 | GGACAAGUAUUCUGGCGGGdTdT | 997 | A-127422.1 | 2621-2639 | CCCGCCAGAAUACUUGUCCdTdT | 1331 | A-127423.1 |
| AD-63578.1 | CUGGCGGGGGGUGGGGGAGdTdT | 998 | A-127424.1 | 2632-2650 | CUCCCCCACCCCCCGCCAGdTdT | 1332 | A-127425.1 |
| AD-63584.1 | GGGUGGGGGAGAGAGCAGGdTdT | 999 | A-127426.1 | 2640-2658 | CCUGCUCUCUCCCCCACCCdTdT | 1333 | A-127427.1 |
| AD-63590.1 | AGAGAGCAGGCCCUGUGGUdTdT | 1000 | A-127428.1 | 2649-2667 | ACCACAGGGCCUGCUCUCUdTdT | 1334 | A-127429.1 |
| AD-63596.1 | CCCUGUGGUGGCAGGAGGUdTdT | 1001 | A-127430.1 | 2659-2677 | ACCUCCUGCCACCACAGGGdTdT | 1335 | A-127431.1 |
| AD-63602.1 | GGAGGUGGCAUCUUGUCUCdTdT | 1002 | A-127432.1 | 2672-2690 | GAGACAAGAUGCCACCUCCdTdT | 1336 | A-127433.1 |
| AD-63608.1 | CAUCUUGUCUCGUCCCUGAdTdT | 1003 | A-127434.1 | 2680-2698 | UCAGGGACGAGACAAGAUGdTdT | 1337 | A-127435.1 |
| AD-63614.1 | CCCUGAUGUCUGCUCCAGUdTdT | 1004 | A-127436.1 | 2693-2711 | ACUGGAGCAGACAUCAGGGdTdT | 1338 | A-127437.1 |
| AD-63573.1 | CUGCUCCAGUGAUGGCAGGdTdT | 1005 | A-127438.1 | 2702-2720 | CCUGCCAUCACUGGAGCAGdTdT | 1339 | A-127439.1 |
| AD-63579.1 | AUGGCAGGAGGAUGGAGAAdTdT | 1006 | A-127440.1 | 2713-2731 | UUCUCCAUCCUCCUGCCAUdTdT | 1340 | A-127441.1 |
| AD-63585.1 | GGAUGGAGAAGUGCCAGCAdTdT | 1007 | A-127442.1 | 2722-2740 | UGCUGGCACUUCUCCAUCCdTdT | 1341 | A-127443.1 |
| AD-63591.1 | UGCCAGCAGCUGGGGGUCAdTdT | 1008 | A-127444.1 | 2733-2751 | UGACCCCCAGCUGCUGGCAdTdT | 1342 | A-127445.1 |
| AD-63597.1 | AGCUGGGGGUCAAGACGUCdTdT | 1009 | A-127446.1 | 2740-2758 | GACGUCUUGACCCCCAGCUdTdT | 1343 | A-127447.1 |
| AD-63603.1 | UCAAGACGUCCCCUGAGGAdTdT | 1010 | A-127448.1 | 2749-2767 | UCCUCAGGGGACGUCUUGAdTdT | 1344 | A-127449.1 |
| AD-63609.1 | CCCUGAGGACCCAGGCCCAdTdT | 1011 | A-127450.1 | 2759-2777 | UGGGCCUGGGUCCUCAGGGdTdT | 1345 | A-127451.1 |
| AD-63615.1 | GCCCACACCCAGCCCUUCUdTdT | 1012 | A-127452.1 | 2773-2791 | AGAAGGGCUGGGUGUGGGCdTdT | 1346 | A-127453.1 |
| AD-63574.1 | AGCCCUUCUGCCUCCCAAUdTdT | 1013 | A-127454.1 | 2783-2801 | AUUGGGAGGCAGAAGGGCUdTdT | 1347 | A-127455.1 |
| AD-63580.1 | CCUCCCAAUUCUCUCUCCUdTdT | 1014 | A-127456.1 | 2793-2811 | AGGAGAGAGAAUUGGGAGGdTdT | 1348 | A-127457.1 |
| AD-63586.1 | CUCUCUCCUCCGUCCCCUUdTdT | 1015 | A-127458.1 | 2803-2821 | AAGGGGACGGAGGAGAGAGdTdT | 1349 | A-127459.1 |
| AD-63592.1 | UCCGUCCCCUUCCUCCACUdTdT | 1016 | A-127460.1 | 2811-2829 | AGUGGAGGAAGGGGACGGAdTdT | 1350 | A-127461.1 |
| AD-63598.1 | CUUCCUCCACUGCUGCCUAdTdT | 1017 | A-127462.1 | 2819-2837 | UAGGCAGCAGUGGAGGAAGdTdT | 1351 | A-127463.1 |
| AD-63604.1 | CUGCCUAAUGCAAGGCAGUdTdT | 1018 | A-127464.1 | 2831-2849 | ACUGCCUUGCAUUAGGCAGdTdT | 1352 | A-127465.1 |
| AD-63610.1 | GCAAGGCAGUGGCUCAGCAdTdT | 1019 | A-127466.1 | 2840-2858 | UGCUGAGCCACUGCCUUGCdTdT | 1353 | A-127467.1 |
| AD-63616.1 | UGGCUCAGCAGCAAGAAUGdTdT | 1020 | A-127468.1 | 2849-2867 | CAUUCUUGCUGCUGAGCCAdTdT | 1354 | A-127469.1 |
| AD-63575.1 | CAAGAAUGCUGGUUCUACAdTdT | 1021 | A-127470.1 | 2860-2878 | UGUAGAACCAGCAUUCUUGdTdT | 1355 | A-127471.1 |
| AD-63581.1 | UGGUUCUACAUCCCGAGGAdTdT | 1022 | A-127472.1 | 2869-2887 | UCCUCGGGAUGUAGAACCAdTdT | 1356 | A-127473.1 |
| AD-63587.1 | CCCGAGGAGUGUCUGAGGUdTdT | 1023 | A-127474.1 | 2880-2898 | ACCUCAGACACUCCUCGGGdTdT | 1357 | A-127475.1 |
| AD-63593.1 | GUCUGAGGUGCGCCCCACUdTdT | 1024 | A-127476.1 | 2890-2908 | AGUGGGGCGCACCUCAGACdTdT | 1358 | A-127477.1 |
| AD-63599.1 | GCCCCACUCUGUACAGAGGdTdT | 1025 | A-127478.1 | 2901-2919 | CCUCUGUACAGAGUGGGGCdTdT | 1359 | A-127479.1 |
| AD-63605.1 | CUGUACAGAGGCUGUUUGGdTdT | 1026 | A-127480.1 | 2909-2927 | CCAAACAGCCUCUGUACAGdTdT | 1360 | A-127481.1 |
| AD-63611.1 | CUGUUUGGGCAGCCUUGCCdTdT | 1027 | A-127482.1 | 2920-2938 | GGCAAGGCUGCCCAAACAGdTdT | 1361 | A-127483.1 |
| AD-63617.1 | CUUGCCUCCAGAGAGCAGAdTdT | 1028 | A-127484.1 | 2933-2951 | UCUGCUCUCUGGAGGCAAGdTdT | 1362 | A-127485.1 |
| AD-63576.1 | UCCAGAGAGCAGAUUCCAGdTdT | 1029 | A-127486.1 | 2939-2957 | CUGGAAUCUGCUCUCUGGAdTdT | 1363 | A-127487.1 |
| AD-63582.1 | GAUUCCAGCUUCGGAAGCCdTdT | 1030 | A-127488.1 | 2950-2968 | GGCUUCCGAAGCUGGAAUCdTdT | 1364 | A-127489.1 |
| AD-63588.1 | GAAUGGAAGGUGCUCCCAUdTdT | 1031 | A-127490.1 | 2991-3009 | AUGGGAGCACCUUCCAUUCdTdT | 1365 | A-127491.1 |
| AD-63594.1 | GUGCUCCCAUCGGAGGGGAdTdT | 1032 | A-127492.1 | 3000-3018 | UCCCCUCCGAUGGGAGCACdTdT | 1366 | A-127493.1 |
| AD-63600.1 | UCGGAGGGGACCCUCAGAGdTdT | 1033 | A-127494.1 | 3009-3027 | CUCUGAGGGUCCCCUCCGAdTdT | 1367 | A-127495.1 |
| AD-63606.1 | CCCUCAGAGCCCUGGAGACdTdT | 1034 | A-127496.1 | 3019-3037 | GUCUCCAGGGCUCUGAGGGdTdT | 1368 | A-127497.1 |
| AD-63612.1 | GAGACUGCCAGGUGGGCCUdTdT | 1035 | A-127498.1 | 3033-3051 | AGGCCCACCUGGCAGUCUCdTdT | 1369 | A-127499.1 |
| AD-63618.1 | AGGUGGGCCUGCUGCCACUdTdT | 1036 | A-127500.1 | 3042-3060 | AGUGGCAGCAGGCCCACCUdTdT | 1370 | A-127501.1 |
| AD-63577.1 | CUGCCACUGUAAGCCAAAAdTdT | 1037 | A-127502.1 | 3053-3071 | UUUUGGCUUACAGUGGCAGdTdT | 1371 | A-127503.1 |
| AD-63583.1 | CUGUAAGCCAAAAGGUGGGdTdT | 1038 | A-127504.1 | 3059-3077 | CCCACCUUUUGGCUUACAGdTdT | 1372 | A-127505.1 |
| AD-63589.1 | GUGGGGAAGUCCUGACUCCdTdT | 1039 | A-127506.1 | 3073-3091 | GGAGUCAGGACUUCCCCACdTdT | 1373 | A-127507.1 |
| AD-63595.1 | CCUGACUCCAGGGUCCUUGdTdT | 1040 | A-127508.1 | 3083-3101 | CAAGGACCCUGGAGUCAGGdTdT | 1374 | A-127509.1 |
| AD-63601.1 | GGGUCCUUGCCCCACCCCUdTdT | 1041 | A-127510.1 | 3093-3111 | AGGGGUGGGGCAAGGACCCdTdT | 1375 | A-127511.1 |
| AD-63607.1 | GCCCCACCCCUGCCUGCCAdTdT | 1042 | A-127512.1 | 3101-3119 | UGGCAGGCAGGGGUGGGGCdTdT | 1376 | A-127513.1 |
| AD-63613.1 | CCUGCCACCUGGGCCCUCAdTdT | 1043 | A-127514.1 | 3113-3131 | UGAGGGCCCAGGUGGCAGGdTdT | 1377 | A-127515.1 |
| AD-63619.1 | CUGGGCCCUCACAGCCCAGdTdT | 1044 | A-127516.1 | 3121-3139 | CUGGGCUGUGAGGGCCCAGdTdT | 1378 | A-127517.1 |
| AD-63620.1 | UCACAGCCCAGACCCUCACdTdT | 1045 | A-127518.1 | 3129-3147 | GUGAGGGUCUGGGCUGUGAdTdT | 1379 | A-127519.1 |
| AD-63621.1 | CUCACUGGGAGGUGAGCUCdTdT | 1046 | A-127520.1 | 3143-3161 | GAGCUCACCUCCCAGUGAGdTdT | 1380 | A-127521.1 |
| AD-63622.1 | GGUGAGCUCAGCUGCCCUUdTdT | 1047 | A-127522.1 | 3153-3171 | AAGGGCAGCUGAGCUCACCdTdT | 1381 | A-127523.1 |
| AD-63623.1 | UGGAAUAAAGCUGCCUGAUdTdT | 1048 | A-127524.1 | 3172-3190 | AUCAGGCAGCUUUAUUCCAdTdT | 1382 | A-127525.1 |

TABLE 13
TMPRSS6 single dose screen (10 nM) in Hep3B
cells with dT modified siRNAs

| | Avg % message | |
|---|---|---|
| Duplex ID | remaining | SD |
| AD-63290.1 | 122.8 | 18.0 |
| AD-63296.1 | 87.4 | 6.0 |
| AD-63302.1 | 71.4 | 16.9 |
| AD-63308.1 | 82.1 | 10.3 |
| AD-63314.1 | 59.1 | 5.3 |
| AD-63320.1 | 90.7 | 4.5 |
| AD-63326.1 | 121.0 | 18.2 |
| AD-63332.1 | 114.4 | 11.6 |
| AD-63291.1 | 84.7 | 15.0 |
| AD-63297.1 | 82.8 | 3.9 |
| AD-63303.1 | 67.6 | 5.5 |
| AD-63309.1 | 55.8 | 6.5 |
| AD-63315.1 | 64.2 | 7.4 |
| AD-63321.1 | 85.8 | 6.4 |
| AD-63327.1 | 91.9 | 14.9 |
| AD-63333.1 | 76.4 | 5.2 |
| AD-63292.1 | 54.4 | 22.9 |
| AD-63298.1 | 54.6 | 5.0 |
| AD-63304.1 | 24.6 | 7.3 |
| AD-63310.1 | 23.3 | 0.6 |
| AD-63316.1 | 50.9 | 7.2 |
| AD-63322.1 | 53.7 | 10.5 |
| AD-63328.1 | 29.2 | 2.3 |
| AD-63334.1 | 28.5 | 1.2 |
| AD-63293.1 | 50.9 | 6.8 |
| AD-63299.1 | 85.5 | 2.3 |
| AD-63305.1 | 43.0 | 7.2 |
| AD-63311.1 | 28.9 | 2.6 |
| AD-63317.1 | 40.9 | 2.7 |
| AD-63323.1 | 40.2 | 7.3 |
| AD-63329.1 | 27.9 | 12.0 |
| AD-63335.1 | 82.0 | 4.2 |
| AD-63294.1 | 21.8 | 1.0 |
| AD-63300.1 | 32.3 | 8.0 |
| AD-63306.1 | 32.9 | 8.3 |
| AD-63312.1 | 26.5 | 4.6 |
| AD-63318.1 | 31.3 | 2.4 |
| AD-63324.1 | 25.7 | 1.9 |
| AD-63330.1 | 24.5 | 2.0 |
| AD-63336.1 | 36.1 | 8.6 |
| AD-63295.1 | 29.2 | 1.8 |
| AD-63301.1 | 28.9 | 5.2 |
| AD-63307.1 | 68.8 | 10.6 |
| AD-63313.1 | 90.2 | 8.2 |
| AD-63319.1 | 21.9 | 3.3 |
| AD-63325.1 | 26.1 | 4.8 |
| AD-63331.1 | 36.7 | 4.5 |
| AD-63337.1 | 67.7 | 9.3 |
| AD-63343.1 | 83.9 | 15.0 |
| AD-63349.1 | 71.6 | 3.5 |
| AD-63355.1 | 62.8 | 10.4 |
| AD-63361.1 | 56.0 | 3.3 |
| AD-63367.1 | 49.3 | 8.7 |
| AD-63373.1 | 54.1 | 8.2 |
| AD-63379.1 | 47.5 | 6.3 |
| AD-63338.1 | 28.0 | 2.8 |
| AD-63344.1 | 29.7 | 5.7 |
| AD-63350.1 | 23.0 | 2.3 |
| AD-63356.1 | 81.5 | 13.7 |
| AD-63362.1 | 19.7 | 2.9 |
| AD-63368.1 | 42.2 | 4.7 |
| AD-63374.1 | 24.5 | 2.0 |
| AD-63380.1 | 24.9 | 4.9 |
| AD-63339.1 | 28.9 | 10.1 |
| AD-63345.1 | 29.9 | 5.6 |
| AD-63351.1 | 20.4 | 3.7 |
| AD-63357.1 | 35.8 | 6.8 |
| AD-63363.1 | 30.4 | 2.5 |
| AD-63369.1 | 29.0 | 3.1 |
| AD-63375.1 | 36.6 | 2.4 |
| AD-63381.1 | 29.1 | 4.3 |
| AD-63340.1 | 40.4 | 18.8 |
| AD-63346.1 | 36.4 | 3.5 |
| AD-63352.1 | 25.8 | 3.9 |
| AD-63358.1 | 42.6 | 8.1 |
| AD-63364.1 | 48.1 | 6.6 |
| AD-63370.1 | 24.6 | 2.8 |
| AD-63376.1 | 22.1 | 4.2 |
| AD-63382.1 | 31.0 | 7.5 |
| AD-63341.1 | 37.6 | 13.7 |
| AD-63347.1 | 27.6 | 2.0 |
| AD-63353.1 | 76.4 | 14.5 |
| AD-63359.1 | 25.3 | 1.1 |
| AD-63365.1 | 27.3 | 3.4 |
| AD-63371.1 | 16.3 | 1.3 |
| AD-63377.1 | 65.4 | 7.1 |
| AD-63383.1 | 72.2 | 7.0 |
| AD-63342.1 | 30.8 | 7.3 |
| AD-63348.1 | 72.7 | 9.2 |
| AD-63354.1 | 38.7 | 5.0 |
| AD-63360.1 | 28.7 | 3.0 |
| AD-63366.1 | 30.9 | 6.8 |
| AD-63372.1 | 84.0 | 9.0 |
| AD-63378.1 | 64.1 | 8.6 |
| AD-63384.1 | 38.0 | 2.6 |
| AD-63390.1 | 48.3 | 10.6 |
| AD-63396.1 | 45.6 | 7.0 |
| AD-63402.1 | 42.0 | 9.9 |
| AD-63408.1 | 40.4 | 9.1 |
| AD-63414.1 | 23.8 | 6.2 |
| AD-63420.1 | 55.3 | 5.2 |
| AD-63426.1 | 61.6 | 8.5 |
| AD-63385.1 | 61.6 | 10.2 |
| AD-63391.1 | 38.0 | 3.1 |
| AD-63397.1 | 66.7 | 16.8 |
| AD-63403.1 | 77.2 | 15.4 |
| AD-63409.1 | 60.3 | 10.7 |
| AD-63415.1 | 35.0 | 5.4 |
| AD-63421.1 | 60.6 | 2.9 |
| AD-63427.1 | 40.5 | 7.2 |
| AD-63386.1 | 42.0 | 7.4 |
| AD-63392.1 | 34.2 | 3.1 |
| AD-63398.1 | 62.6 | 18.5 |
| AD-63404.1 | 65.9 | 8.1 |
| AD-63410.1 | 19.7 | 4.0 |
| AD-63416.1 | 51.3 | 9.0 |
| AD-63422.1 | 59.3 | 2.7 |
| AD-63428.1 | 58.2 | 9.7 |
| AD-63387.1 | 42.2 | 4.8 |
| AD-63393.1 | 27.9 | 4.4 |
| AD-63399.1 | 49.6 | 8.4 |
| AD-63405.1 | 72.5 | 9.3 |
| AD-63411.1 | 45.4 | 14.9 |
| AD-63417.1 | 36.7 | 9.4 |
| AD-63423.1 | 76.8 | 4.9 |
| AD-63429.1 | 77.8 | 14.4 |
| AD-63388.1 | 37.4 | 4.4 |
| AD-63394.1 | 31.5 | 4.6 |
| AD-63400.1 | 60.9 | 28.6 |
| AD-63406.1 | 40.7 | 14.3 |
| AD-63412.1 | 22.0 | 7.0 |
| AD-63418.1 | 22.8 | 4.3 |
| AD-63424.1 | 25.5 | 2.8 |
| AD-63430.1 | 21.5 | 3.2 |
| AD-63389.1 | 34.4 | 5.3 |
| AD-63395.1 | 31.1 | 0.7 |
| AD-63401.1 | 44.3 | 9.5 |
| AD-63407.1 | 41.5 | 4.9 |
| AD-63413.1 | 52.4 | 6.4 |
| AD-63419.1 | 26.3 | 5.6 |
| AD-63425.1 | 78.8 | 4.6 |
| AD-63431.1 | 32.8 | 6.6 |
| AD-63437.1 | 42.3 | 1.4 |
| AD-63443.1 | 56.4 | 8.9 |
| AD-63449.1 | 26.0 | 5.9 |
| AD-63455.1 | 28.0 | 9.7 |
| AD-63461.1 | 32.1 | 11.1 |
| AD-63467.1 | 33.8 | 19.8 |
| AD-63473.1 | 28.9 | 3.4 |
| AD-63432.1 | 36.5 | 7.4 |
| AD-63438.1 | 27.3 | 4.3 |
| AD-63444.1 | 54.6 | 36.0 |
| AD-63450.1 | 42.0 | 6.1 |
| AD-63456.1 | 36.6 | 10.2 |
| AD-63462.1 | 23.3 | 3.0 |
| AD-63468.1 | 48.8 | 27.3 |
| AD-63474.1 | 23.8 | 3.2 |
| AD-63433.1 | 51.8 | 13.8 |
| AD-63439.1 | 41.7 | 5.5 |
| AD-63445.1 | 74.6 | 6.1 |
| AD-63451.1 | 49.6 | 9.0 |
| AD-63457.1 | 26.7 | 4.9 |
| AD-63463.1 | 27.8 | 3.8 |
| AD-63469.1 | 48.4 | 14.0 |
| AD-63475.1 | 40.3 | 1.4 |
| AD-63434.1 | 93.3 | 9.9 |
| AD-63440.1 | 37.6 | 4.7 |
| AD-63446.1 | 38.1 | 15.4 |
| AD-63452.1 | 42.3 | 4.0 |
| AD-63458.1 | 29.7 | 7.9 |
| AD-63464.1 | 25.7 | 3.4 |
| AD-63470.1 | 44.8 | 7.8 |
| AD-63476.1 | 33.9 | 4.7 |
| AD-63435.1 | 23.4 | 5.2 |
| AD-63441.1 | 37.1 | 4.5 |
| AD-63447.1 | 46.5 | 9.0 |
| AD-63453.1 | 73.1 | 16.8 |
| AD-63459.1 | 31.8 | 4.6 |
| AD-63465.1 | 27.3 | 6.6 |
| AD-63471.1 | 19.5 | 3.1 |
| AD-63477.1 | 35.2 | 4.7 |
| AD-63436.1 | 21.8 | 4.7 |
| AD-63442.1 | 44.1 | 11.2 |
| AD-63448.1 | 33.6 | 6.0 |
| AD-63454.1 | 58.2 | 16.8 |
| AD-63460.1 | 27.7 | 2.4 |
| AD-63466.1 | 27.1 | 4.4 |
| AD-63472.1 | 20.5 | 4.1 |
| AD-63478.1 | 36.3 | 7.3 |
| AD-63484.1 | 48.4 | 31.3 |
| AD-63490.1 | 44.0 | 6.1 |
| AD-63496.1 | 45.5 | 19.9 |
| AD-63502.1 | 49.0 | 18.3 |
| AD-63508.1 | 41.4 | 2.7 |
| AD-63514.1 | 36.0 | 5.1 |
| AD-63520.1 | 40.9 | 4.2 |
| AD-63479.1 | 35.1 | 6.5 |
| AD-63485.1 | 45.5 | 24.0 |
| AD-63491.1 | 69.0 | 14.5 |
| AD-63497.1 | 57.1 | 25.1 |
| AD-63503.1 | 36.0 | 15.3 |
| AD-63509.1 | 29.7 | 6.4 |
| AD-63515.1 | 33.9 | 5.7 |
| AD-63521.1 | 117.2 | 10.2 |
| AD-63480.1 | 38.6 | 0.7 |
| AD-63486.1 | 48.5 | 12.1 |
| AD-63492.1 | 38.7 | 3.7 |
| AD-63498.1 | 64.6 | 20.3 |
| AD-63504.1 | 41.7 | 1.9 |
| AD-63510.1 | 39.6 | 4.0 |
| AD-63516.1 | 30.9 | 4.8 |
| AD-63522.1 | 56.4 | 15.6 |
| AD-63481.1 | 72.0 | 7.3 |
| AD-63487.1 | 128.8 | 48.9 |
| AD-63493.1 | 31.7 | 6.7 |
| AD-63499.1 | 44.2 | 17.7 |
| AD-63505.1 | 69.4 | 7.6 |
| AD-63511.1 | 43.8 | 5.3 |
| AD-63517.1 | 75.3 | 2.2 |
| AD-63523.1 | 82.1 | 10.6 |
| AD-63482.1 | 40.1 | 12.2 |
| AD-63488.1 | 42.3 | 12.7 |
| AD-63494.1 | 19.0 | 1.1 |
| AD-63500.1 | 30.2 | 11.2 |
| AD-63506.1 | 30.5 | 7.6 |
| AD-63512.1 | 38.1 | 15.2 |
| AD-63518.1 | 35.0 | 7.3 |
| AD-63524.1 | 60.5 | 3.7 |
| AD-63483.1 | 22.7 | 3.6 |
| AD-63489.1 | 47.6 | 13.7 |
| AD-63495.1 | 31.0 | 12.7 |
| AD-63501.1 | 24.3 | 2.1 |
| AD-63507.1 | 37.4 | 7.0 |
| AD-63513.1 | 32.3 | 5.1 |
| AD-63519.1 | 46.0 | 6.6 |
| AD-63525.1 | 66.5 | 14.5 |
| AD-63531.1 | 104.0 | 24.1 |
| AD-63537.1 | 32.1 | 3.4 |
| AD-63543.1 | 31.2 | 3.8 |
| AD-63549.1 | 35.2 | 5.2 |
| AD-63555.1 | 41.7 | 9.3 |
| AD-63561.1 | 44.2 | 7.0 |
| AD-63567.1 | 39.2 | 4.9 |
| AD-63526.1 | 66.9 | 15.7 |
| AD-63532.1 | 90.3 | 17.8 |
| AD-63538.1 | 50.8 | 11.5 |
| AD-63544.1 | 31.9 | 2.4 |
| AD-63550.1 | 35.0 | 8.8 |
| AD-63556.1 | 31.0 | 6.0 |
| AD-63562.1 | 20.2 | 2.4 |
| AD-63568.1 | 30.6 | 2.7 |
| AD-63527.1 | 28.8 | 2.4 |
| AD-63533.1 | 63.3 | 6.9 |
| AD-63539.1 | 28.4 | 3.5 |
| AD-63545.1 | 26.9 | 8.5 |
| AD-63551.1 | 52.5 | 4.7 |
| AD-63557.1 | 26.7 | 2.2 |
| AD-63563.1 | 28.1 | 2.7 |
| AD-63569.1 | 29.2 | 2.8 |
| AD-63528.1 | 52.9 | 9.0 |
| AD-63534.1 | 42.5 | 6.8 |
| AD-63540.1 | 50.5 | 10.9 |
| AD-63546.1 | 53.6 | 10.5 |
| AD-63552.1 | 38.8 | 5.0 |
| AD-63558.1 | 49.3 | 3.0 |
| AD-63564.1 | 69.2 | 3.1 |
| AD-63570.1 | 50.6 | 6.0 |
| AD-63529.1 | 59.5 | 6.5 |
| AD-63535.1 | 21.0 | 1.7 |
| AD-63541.1 | 40.1 | 23.4 |
| AD-63547.1 | 26.0 | 9.6 |
| AD-63553.1 | 31.5 | 6.0 |
| AD-63559.1 | 34.9 | 2.7 |
| AD-63565.1 | 43.3 | 5.3 |
| AD-63571.1 | 41.6 | 4.4 |
| AD-63530.1 | 127.6 | 15.0 |
| AD-63536.1 | 38.0 | 16.0 |
| AD-63542.1 | 48.3 | 8.4 |
| AD-63548.1 | 41.9 | 7.9 |
| AD-63554.1 | 88.2 | 15.2 |
| AD-63560.1 | 48.8 | 17.7 |
| AD-63566.1 | 33.6 | 6.8 |
| AD-63572.1 | 82.4 | 67.9 |
| AD-63578.1 | 78.5 | 11.5 |
| AD-63584.1 | 55.7 | 7.2 |
| AD-63590.1 | 53.4 | 2.9 |
| AD-63596.1 | 63.5 | 8.6 |
| AD-63602.1 | 49.3 | 3.6 |
| AD-63608.1 | 29.2 | 4.4 |
| AD-63614.1 | 30.0 | 7.4 |
| AD-63573.1 | 96.1 | 14.7 |
| AD-63579.1 | 38.1 | 4.5 |
| AD-63585.1 | 40.0 | 2.1 |
| AD-63591.1 | 30.5 | 2.5 |
| AD-63597.1 | 55.1 | 5.8 |
| AD-63603.1 | 43.6 | 4.0 |
| AD-63609.1 | 37.7 | 2.7 |
| AD-63615.1 | 44.4 | 9.7 |
| AD-63574.1 | 44.3 | 10.3 |
| AD-63580.1 | 33.1 | 3.5 |
| AD-63586.1 | 39.3 | 2.9 |
| AD-63592.1 | 73.7 | 1.6 |
| AD-63598.1 | 32.4 | 6.6 |
| AD-63604.1 | 98.7 | 7.1 |
| AD-63610.1 | 42.1 | 7.1 |
| AD-63616.1 | 55.2 | 10.4 |
| AD-63575.1 | 27.8 | 3.0 |
| AD-63581.1 | 36.3 | 3.2 |
| AD-63587.1 | 36.1 | 3.3 |
| AD-63593.1 | 39.2 | 4.7 |
| AD-63599.1 | 37.0 | 5.6 |
| AD-63605.1 | 49.3 | 3.7 |
| AD-63611.1 | 88.8 | 7.7 |
| AD-63617.1 | 45.6 | 6.6 |
| AD-63576.1 | 59.9 | 2.9 |
| AD-63582.1 | 82.9 | 8.3 |
| AD-63588.1 | 33.5 | 6.7 |
| AD-63594.1 | 64.7 | 18.0 |
| AD-63600.1 | 99.5 | 11.9 |
| AD-63606.1 | 40.8 | 2.7 |
| AD-63612.1 | 44.5 | 5.3 |
| AD-63618.1 | 41.7 | 4.6 |
| AD-63577.1 | 31.1 | 0.3 |
| AD-63583.1 | 57.3 | 8.6 |
| AD-63589.1 | 61.9 | 5.9 |
| AD-63595.1 | 51.2 | 8.5 |
| AD-63601.1 | 70.7 | 15.4 |
| AD-63607.1 | 39.4 | 1.9 |
| AD-63613.1 | 36.8 | 2.7 |
| AD-63619.1 | 83.8 | 13.8 |
| AD-63620.1 | 69.4 | 7.3 |
| AD-63621.1 | 30.6 | 3.1 |
| AD-63622.1 | 51.8 | 8.4 |
| AD-63623.1 | 37.3 | 8.6 |

1. A double stranded ribonucleic acid (dsRNA) agent, or a pharmaceutically acceptable salt thereof, capable of inhibiting expression of TMPRSS6 in a cell, wherein said dsRNA agent, or a pharmaceutically acceptable salt thereof, comprises a sense strand and an antisense strand forming a double-stranded region, wherein said sense strand comprises at least 15 contiguous nucleotides differing by no more than 3 nucleotides from any one of the nucleotide sequences of SEQ ID NO:1, SEQ ID NO:2, or SEQ ID NO:3, SEQ ID NO:4, or SEQ ID NO:5, and said antisense strand comprises at least 15 contiguous nucleotides differing by no more than 3 nucleotides from any one of the nucleotide sequences of SEQ ID NO:6, SEQ ID NO:7, or SEQ ID NO:8, SEQ ID NO:9, or SEQ ID NO:10,
wherein substantially all of the nucleotides of said sense strand and substantially all of the nucleotides of said antisense strand are modified nucleotides, and
wherein said sense strand is conjugated to a ligand attached at the 3′- terminus.

2. The dsRNA agent, or a pharmaceutically acceptable salt thereof, of claim 1, wherein all of the nucleotides of said sense strand and all of the nucleotides of said antisense strand are modified nucleotides.

3. The dsRNA agent, or a pharmaceutically acceptable salt thereof, of claim 1, wherein said sense strand and said antisense strand comprise a region of complementarity which comprises at least 15 contiguous nucleotides differing by no more than 3 nucleotides from any one of the antisense sequences listed in any one of Tables 1, 2,4, 5, 8, 10, and 12.

4. (canceled)

5. The dsRNA agent, or a pharmaceutically acceptable salt thereof, of any claim 1, wherein at least one strand comprises a 3′ overhang of at least 1 nucleotide or at least 2 nucleotides.

6-17. (canceled)

18. The dsRNA agent, or a pharmaceutically acceptable salt thereof, of claim 1, wherein the double-stranded region is 15-30 nucleotide pairs in length.

19-23. (canceled)

24. The dsRNA agent, or a pharmaceutically acceptable salt thereof, of claim 1, wherein each strand is 15-30 nucleotides in length.

25. (canceled)

26. The dsRNA agent, or a pharmaceutically acceptable salt thereof, of claim 1, wherein the modifications on the nucleotides are selected from the group consisting of LNA, HNA, CeNA, 2′-methoxyethyl, 2′-O-alkyl, 2′-O-allyl, 2′-C-allyl, 2′-fluoro, 2′-deoxy, 2′-hydroxyl, and combinations thereof.

27. (canceled)

28. The dsRNA agent, or a pharmaceutically acceptable salt thereof, of claim 1, wherein the ligand is one or more GalNAc derivatives attached through a bivalent or trivalent branched linker.

29. The dsRNA agent, or a pharmaceutically acceptable salt thereof, of claim 1, wherein the ligand is

30. (canceled)

31. (canceled)

32. The dsRNA agent, or a pharmaceutically acceptable salt thereof, of claim 1, wherein said agent further comprises at least one phosphorothioate or methylphosphonate intemucleotide linkage.

33-40. (canceled)

41. The dsRNA agent, or a pharmaceutically acceptable salt thereof, of claim 32, wherein dsRNA agent, or a pharmaceutically acceptable salt thereof, comprises 6-8 phosphorothioate intemucleotide linkages.

42-52. (canceled)

53. The dsRNA agent, or a pharmaceutically acceptable salt thereof, of claim 1, wherein said dsRNA agent, or a pharmaceutically acceptable salt thereof, is selected from the group of dsRNA agents listed in any one of Tables 1, 2, 4, 5, 8, 10, and 12.

54. (canceled)

55. (canceled)

56. A double stranded ribonucleic acid (dsRNA) agent, or a pharmaceutically acceptable salt thereof, capable of inhibiting expression of TMPRSS6 in a cell,
wherein said dsRNA agent, or a pharmaceutically acceptable salt thereof, comprises a sense strand and an antisense strand forming a double stranded region,
wherein said sense strand comprises at least 15 contiguous nucleotides differing by no more than 3 nucleotides from any one of the nucleotide sequences of SEQ ID NO:1, SEQ ID NO:2, or SEQ ID NO:3, SEQ ID NO:4, or SEQ ID NO:5, and said antisense strand comprises at least 15 contiguous nucleotides differing by no more than 3 nucleotides from any one of the nucleotide sequences of SEQ ID NO:6, SEQ ID NO:7, or SEQ ID NO:8, SEQ ID NO:9, or SEQ ID NO: 10,
wherein substantially all of the nucleotides of said sense strand comprise a modification selected from the group consisting of a 2′-O-methyl modification and a 2′-fluoro modification,
wherein said sense strand comprises two phosphorothioate internucleotide linkages at the 5′-terminus,
wherein substantially all of the nucleotides of said antisense strand comprise a modification selected from the group consisting of a 2′-O-methyl modification and a 2′-fluoro modification,
wherein said antisense strand comprises two phosphorothioate internucleotide linkages at the 5′-terminus and two phosphorothioate internucleotide linkages at the 3′-terminus, and
wherein said sense strand is conjugated to one or more GalNAc derivatives attached through a branched bivalent or trivalent linker at the 3′-terminus.

57-67. (canceled)

68. A pharmaceutical composition comprising the dsRNA agent, or a pharmaceutically acceptable salt thereof, of claim 1.

69-73. (canceled)

74. A method of inhibiting TMPRSS6 expression in a cell, the method comprising:
(a) contacting the cell with the dsRNA agent, or a pharmaceutically acceptable salt thereof, of claim 1; and
(b) maintaining the cell produced in step (a) for a time sufficient to obtain degradation of the mRNA transcript of a TMPRSS6 gene, thereby inhibiting expression of the TMPRSS6 gene in the cell.

75-81. (canceled)

82. A method of treating a subject having a TMPRSS6 associated disorder, comprising administering to the subject a therapeutically effective amount of the dsRNA agent, or a pharmaceutically acceptable salt thereof, of claim 1, thereby treating said subject.

83-100. (canceled)

101. An isolated cell containing the dsRNA agent, or a pharmaceutically acceptable salt thereof, of claim 1.

The application's sequence listing, which the Patent Office published only in electronic form, follows.

SEQUENCE LISTING (1382 sequences)

SEQ ID NO: 1 - DNA, 3212 bp, Homo sapiens
  source 1..3212: mol_type = genomic DNA
cttgagccagacccagtccagctctggtgcctgccctctggtgcgagctgacctgagatgcacttccctcctctgtgagctgtctcggcacccacttgcagtcactgccgcctgatgttgttactcttccactccaaaaggatgcccgtggccgaggccccccaggtggctggcgggcagggggacggaggtgatggcgaggaagcggagccggaggggatgttcaaggcctgtgaggactccaagagaaaagcccggggctacctccgcctggtgcccctgtttgtgctgctggccctgctcgtgctggcttcggcgggggtgctactctggtatttcctagggtacaaggcggaggtgatggtcagccaggtgtactcaggcagtctgcgtgtactcaatcgccacttctcccaggatcttacccgccgggaatctagtgccttccgcagtgaaaccgccaaagcccagaagatgctcaaggagctcatcaccagcacccgcctgggaacttactacaactccagctccgtctattcctttggggagggacccctcacctgcttcttctggttcattctccaaatccccgagcaccgccggctgatgctgagccccgaggtggtgcaggcactgctggtggaggagctgctgtccacagtcaacagctcggctgccgtcccctacagggccgagtacgaagtggaccccgagggcctagtgatcctggaagccagtgtgaaagacatagctgcattgaattccacgctgggttgttaccgctacagctacgtgggccagggccaggtcctccggctgaaggggcctgaccacctggcctccagctgcctgtggcacctgcagggccccaaggacctcatgctcaaactccggctggagtggacgctggcagagtgccgggaccgactggccatgtatgacgtggccgggcccctggagaagaggctcatcacctcggtgtacggctgcagccgccaggagcccgtggtggaggttctggcgtcgggggccatcatggcggtcgtctggaagaagggcctgcacagctactacgaccccttcgtgctctccgtgcagccggtggtcttccaggcctgtgaagtgaacctgacgctggacaacaggctcgactcccagggcgtcctcagcaccccgtacttccccagctactactcgccccaaacccactgctcctggcacctcacggtgccctctctggactacggcttggccctctggtttgatgcctatgcactgaggaggcagaagtatgatttgccgtgcacccagggccagtggacgatccagaacaggaggctgtgtggcttgcgcatcctgcagccctacgccgagaggatccccgtggtggccacggccgggatcaccatcaacttcacctcccagatctccctcaccgggcccggtgtgcgggtgcactatggcttgtacaaccagtcggacccctgccctggagagttcctctgttctgtgaatggactctgtgtccctgcctgtgatggggtcaaggactgccccaacggcctggatgagagaaactgcgtttgcagagccacattccagtgcaaagaggacagcacatgcatctcactgcccaaggtctgtgatgggcagcctgattgtctcaacggcagcgacgaagagcagtgccaggaaggggtgccatgtgggacattcaccttccagtgtgaggaccggagctgcgtgaagaagcccaacccgcagtgtgatgggcggcccgactgcagggacggctcggatgaggagcactgtgactgtggcctccagggcccctccagccgcattgttggtggagctgtgtcctccgagggtgagtggccatggcaggccagcctccaggttcggggtcgacacatctgtgggggggccctcatcgctgaccgctgggtgataacagctgcccactgcttccaggaggacagcatggcctccacggtgctgtggaccgtgttcctgggcaaggtgtggcagaactcgcgctggcctggagaggtgtccttcaaggtgagccgcctgctcctgcacccgtaccacgaagaggacagccatgactacgacgtggcgctgctgcagctcgaccacccggtggtgcgctcggccgccgtgcgccccgtctgcctgcccgcgcgctcccacttcttcgagcccggcctgcactgctggattacgggctggggcgccttgcgcgagggcggccccatcagcaacgctctgcagaaagtggatgtgcagttgatcccacaggacctgtgcagcgaggtctatcgctaccaggtgacgccacgcatgctgtgtgccggctaccgcaagggcaagaaggatgcctgtcagggtgactcaggtggtccgctggtgtgcaaggcactcagtggccgctggttcctggcggggctggtcagctggggcctgggctgtggccggcctaactacttcggcgtctacacccgcatcacaggtgtgatcagctggatccagcaagtggtgacctgaggaactgcccccctgcaaagcagggcccacctcctggactcagagagcccagggcaactgccaagcagggggacaagtattctggcggggggtgggggagagagcaggccctgtggtggcaggaggtggcatcttgtctcgtccctgatgtctgctccagtgatggcaggaggatggagaagtgccagcagctgggggtcaagacgtcccctgaggacccaggcccacacccagcccttctgcctcccaattctctctcctccgtccccttcctccactgctgcctaatgcaaggcagtggctcagcagcaagaatgctggttctacatcccgaggagtgtctgaggtgcgccccactctgtacagaggctgtttgggcagccttgcctccagagagcagattccagcttcggaagcccctggtctaacttgggatctgggaatggaaggtgctcccatcggaggggaccctcagagccctggagactgccaggtgggcctgctgccactgtaagccaaaaggtggggaagtcctgactccagggtccttgccccacccctgcctgccacctgggccctcacagcccagaccctcactgggaggtgagctcagctgccctttggaataaagctgcctgatcaaaaaaaaaaaaaaaaaaaaa

SEQ ID NO: 2 - DNA, 3206 bp, Mus musculus
  source 1..3206: mol_type = genomic DNA
agtttcattgtcgccctggacctgacaggagaggcccatggaacttggggccacaggccacaagggacaagggccagacaccccagccatggctccaggccattgatccaacctaagctggccagttgggggtggaaagaccttggcctggataaacagaggcctccaggcctgtgtgcaggcccggcacctaccttccactcttgaagatgccgagatgtttccagctcccctgttctaccaggatgcccaccaccgaggtcccccaagcggctgatggtcagggcgatgcgggtgatggagaggaagctgctgagccagaggggaagttcaagcccccaaaaaacaccaagagaaaaaaccgggactacgtccgcttcacgccactgttgctggtcttggctgcgctggtctcagcaggggtcatgctttggtatttcctagggtacaaagcggaagtgaccgtaagccaggtgtactctggcagcctccgggtgctcaaccgtcatttctcccaggacctgggccgacgggagtctattgctttccgcagtgaatctgccaaagcccagaagatgctccaagaactggttgccagcacccgcctgggtacttactacaactctagttctgtctactcctttggggagggacccctcacctgcttcttctggtttatccttgacatccctgagtaccagcgactgaccctgagccctgaagtagtgcgcgagctcctggtggatgagctactgtccaacagctcaaccctggcttcctataagaccgaatatgaggtggacccggaaggcctggtgatcctggaagccagtgtgaacgacatagtcgtactgaattccacgctgggctgttatcgctacagctatgtgaacccaggccaggtcctcccattgaaggggcctgaccagcagaccacaagctgcctgtggcatctgcaagggcccgaagacctcatgatcaaagtgcggctggagtggacccgggtcgattgcagagacagggtggcgatgtacgacgcagctgggcccctggagaagagacttatcacctcggtctatgggtgcagccgccaggaacctgtgatggaggtgctggcatcgggctccgtcatggccgtggtgtggaaaaagggcatgcatagctactatgaccctttcctgctctcagtgaagtctgtggccttccaggactgccaggtgaacctgacactggagggccggctggacacacagggcttcctccgtacaccctactaccccagttactactctcccagtacccactgctcctggcatctcacggtaccctctctggactacggcttggcgctctggttcgatgcctacgcactgaggaggcagaagtacaaccgactgtgtactcagggccagtggatgatccagaacaggaggctgtgtggcttccgtaccctgcagccatatgctgagaggatccccatggtggcctcagatggtgtcaccatcaacttcacctcccagatctccctcacaggcccgggtgtgcaagtgtactacagcttgtacaaccaatcagacccctgccctggtgagttcctctgctctgtgaatggactgtgtgtccctgcgtgtgacgggatcaaggactgccccaatggcctggatgagagaaactgtgtctgcagagccatgttccagtgccaagaggacagcacgtgcatttcactgcctagagtctgtgaccggcagcccgactgtctcaatggcagtgacgaagaacagtgccaagaaggagtgccctgtgggacattcactttccagtgtgaggaccggagctgtgtgaagaagcccaacccagagtgtgacggccagtcagattgcagagacggctcagatgagcaacactgtgactgtggcctccagggcctctccagccgtattgtgggcgggaccgtgtcctccgagggtgagtggccatggcaggccagcctccagattcggggtcgacacatctgtgggggggctctcatcgctgaccgctgggtcataacggccgcccactgcttccaggaggacagcatggcctccccgaagctgtggaccgtgttcctgggaaagatgcggcagaactcgcgctggccaggcgaggtgtccttcaaggtgagccgtctgttcctgcacccgtaccacgaggaggacagccatgactacgacgtggccctgctgcagctcgaccaccccgtggtgtactcggccactgtgcgccccgtctgcctgcctgcccgctcccacttctttgagccaggccagcactgctggatcacaggctggggagcccagcgagagggtggtccggtgagcaacaccctgcagaaggtggacgtacagctggtccctcaggacctctgcagtgaggcctaccgctaccaggtgtccccacgcatgctctgtgctggctaccgcaagggcaagaaagatgcctgccagggtgactctggaggcccactggtttgcagggagcccagtggccgctggttcctggcagggttggttagctggggcctgggctgtggccgacccaatttctttggcgtctacacccgtgtcacacgtgtgatcaactggatccagcaggtgctgacctgagggctgttctacagagctggacctgcctccaggccaagttcagggtgtccacccagccaggacacaagtattctggggcaagtgaccctgctaaggcctgtttccctcaggcctaccccagtgacagtacagagaaggatgtcagctggtggttaggatgcctcctgaggtccaggggccagcctcggctaggtttcacttctaaccctttcttattctagtcctttcccctccctgctcctaccactgttttggagtggggtctggcggccatgaccttggcctccgggtctctgtaggaaagaaagaatccttccccttgcaaaagcctcttgggggaactgcacagagaaagaaggtgcctctatcaaggctctatcagagcccttgagtctgccaagtgggctgtactctaagccaaatcaccgggcagcctcagctgcagatgcctgctgaagctctgcctgctacaggggcctccctgccattcactggaggcccactgtctgttctgggaataaagcacttgaccaagccctgacactgaaaaaaaaaaaaaaa

SEQ ID NO: 3 - DNA, 2999 bp, Rattus norvegicus
  source 1..2999: mol_type = genomic DNA
attgtccgtcctggacctgacaggaggcccatggaacttggggccacaggccacgagggacaagggccagacaccccagtcatggttccaggctattgatccaacctaagctggccagttgtgggtggagagaccttggcctggataaacagaggcctccaggcctgtgttcaggcccagcacctaccttccactcttgaagatgccaagatgtttccagctcccctgttctaccaggatgcccaccgctgaggttccccaagcagctggtggtcagggtgatggaggtgatggagaggaagctgcagagccagagggggtgttcaaggcccccagaaacgccaagagaaaagacagggactacgtccgcttcacaccactgttgctggtcttggctgcgttggcttcggcaggagtcatgctctggtatttcctagggtacaaggcggaagtgaccataagccaggtgtactctggcagcctccgggtgctcaaccgccatttttcacaggacttggcccgacgggagtctattgctttccgcactgaaactgccaaagcccagaagatgttccaagagctggttgccagcacccgcttgggtacttactacaactccagttccatctacgcctttggggagggaccccttatctgcttcttctggttcatccttgacatccccgagtaccagcgactgaccctgagccctgaggtggtgcgcgagctcctggtgggtgagctactgtccaacagctcagccttggcttcctataggaccgaatatgaggtggacccggaaggcctggtgatactagaagccagcgtgaacgacatagtcgtactgaattccacgctgggctgttaccgctacagctacgtgaacccgggccaggtcctccggttgagggggcccgaccagcagaccactagctgcctgtggcacctgcaggggcccgaggacctcatgctcaaagtgcagctagagtggactcgggttgattgcagagacagggtggcgatgtacgacgcagctgggcccctggagaagagacttatcacctcggtctatgggtgcagccgccaggaacccgtgatggaggtgctggcgtcgggctctgtcatggccgtggtgtggaagaagggcttgcatagcttctatgacccttttctgctctcagtgaagtctgtggccttccaggactgccaggtgaacctgaccctggaaggccggctggatccacagggcttcctccgtacaccctactaccccagttactactcgcccagtacccactgctcctggcatctcacggttccctctctggactatggcttggcactctggtttgacgcctatgcactgaggaggcagaagtacaacctactatgtactcagggccagtggatgatccagaacaggaggctatgtggcttccgtaccctgcagccatatgctgagaggatccccgtggtggcctcggatggtatcaccatcaacttcacctcccagatctccctcacaggcccgggtgtgcaagtgtactacagcttgtacaaccaatcagacccctgccctggagagttcctctgctctgtgaatggattgtgtgtccctgcttgtgacggaatcaaggactgccccaacggcctggatgagaggaactgtgtctgcagagccatgttccagtgccaagaggacagcacgtgcatctcactgccgagagtctgtgaccggcagcccgactgtctcaatggtagcgacgaagagcagtgccaagaaggagtgccctgtgggacattcactttccagtgtgaggaccggagctgtgtgaagaagcccaaccccgagtgtgacgggcaggcagactgcagggatggctcggatgaggagcactgtgactgtggcctccagggcccctccagccgcattgtgggcggggccatgtcctcggagggtgagtggccctggcaggccagtctccagattcggggtcgacacatctgtgggggggctctcatcgctgaccgctgggtcataacagccgctcactgcttccaggaggacagcatggcctccccgaggctgtggaccgtgtttctgggaaagatgcggcagaattcacgctggccgggcgaggtgtccttcaaggtgagccgcctgttcctgcacccgtatcatgaggaggacagccatgactacgacgtggccctgctgcagctggaccaccctgtggtgtactcggccaccgtgcgccccgtctgcctgcccgcacgctctcacttctttgagccaggccagcactgctggatcacaggctggggagcccagcgagagggtggtcctggtagcagcacccttcagaaggtggatgtgcaactgatccctcaggacctgtgcaatgaggcctaccgttaccaggtgaccccacgcatgctctgtgctggttatcgcaagggcaagaaagatgcctgccagggcgactctggaggcccactggtttgcaaggagcccaggtgaccacccagccagggcacaagtattctggggcgagcgaccctgctaaggcctgtcccctcatgcctaccccagggacagtacagagaaggatgtcagctggtggttaggatgcctccaggggctagcctcagctcggcttcacttccaaccctttcttattctagtcctttcccctctcccctcctactgctgttttggggtggggtctggtggcaatgatgctggttccaaggtctgtgggaaagtaagattccttccccttgcaaaagcctctagggggaactggatccgagaaagaaggtgcctctatcaaggctctgtcagagcccttgagactgccaagtagggccataccgtaagccaaatcatggggcagcctcagctgcgggtgcctgctgtgctctgcctgctacagggccctccctgccattcactggaggcccactgtctgttccggaaataaagcagttggccaagc

SEQ ID NO: 4 - DNA, 2440 bp, Macaca mulatta
  source 1..2440: mol_type = genomic DNA
caggatgcctgtggccaaggccccccaggtggctggtgggcagggggacggaggtgatggcgaggaagcggagccagaggggatgttcgaggcccgtgaggactccaagagaaaagcccggggctacctccgcctggcgcccctgtggctgaccctggttgtgctgacttcagtgggggtgctactctggtatttcctagggtacaaggcggaggtgacggtcagccaggtgtactcaggcagcctgcgcgtgctcaatcgccacttctcccaggatcttacccgccgggaatccagtgccttccgcagtgaaaccgccaaagcccagaagatgctcaaggagctcatcgccagcacccgcctgggaacttattacaactccagctccgtctattcctttggggagggaccgctcacctgcttcttctggttcattctccaaatccccgagcaccgccggctgatgctgagccccgaggtggtgcaggcactgctggtggaggagctgctgtccacagtcaacagctcggcggctgtcccctacagggccgagtacgaagtggaccccgagggcctagtgatcctagaagccagtgtgaaagacatagctgcactgaattccacgctgggttgttaccgctacagctacgtgggccagggtcaggtcctccggctgaagggacccgaccacctggcctccagctgcctgtggcacctgcagggccccgaagacctcatgctgaaactccggctggagtggacgctggccgagtgccgggaccgactggccatgtatgacgtggctgggcccctggagaagaggctcatcacctcggtgtatggctgcagccgccaggagcctgtggtggaagtcctggcatcgggggccatcatggcggtggtctggaagaagggcctgcacagctactacgacccctttatgctctccgtgcagtcggtggtcttccaggcctgcgaggtaaacctgacgctggatgacaggctggactcccagggcgtcctcagcaccccgtacttccccagctactactcgccccgaacccactgctcctggcacctcacggtgccctctctggactacggcttggccctctggtttgacgcctacgcactgcggaggcagaagtatgatttgccgtgcacccagggccagtggacgatccagaacaggaggctgtgtggcctgcgcatcctgcagccttacgccgagaggatccccgtggtggccacggccggcatcaccatcaatttcacctcccagatctccctcacagggcctggtgtgcgggtgcactatggcttgtacaaccagtcggacccctgccctggagagttcctctgctctgtgaacggactctgcgtccctgcctgtgatggggtcaaggactgccccaacggcctggatgagagaaactgcgtttgcagagccacattccagtgccaagaggacagcacgtgcatctcactgcttaaggtctgtgacgggcagcctgactgtctcaacggcagcgatgaagagcggtgccaggaaggggtgccctgcgggacattcaccttccagtgtgaggaccagagctgcgtgaagaagcccaacccacagtgtgatgggcggcccgactgcagggacggctcagacgagcagcactgtgactgtggcctccagggcccctccagtcgcattgttggtggggccgtgtcctccgagggtgagtggccatggcaggccagcctccaggttcggggtcgacacatctgtgggggcgccctcatcgctgaccgctgggtgataacagctgcccattgcttccaggaggacagcatggcctccccggcgctgtggacggtgttcctgggcaaggtgtggcagaactcgcgctggcctggagaggtgtccttcaaggtgagccgcctactcctgcatccgtatcacgaagaggacagccacgactacgacgtggcgctgttgcagctcgaccacccggtggtgcgctcggccgccgtgcgtccagtctgcctgcccgcgcgctcccacttcttcgaacccggcctgcactgctggatcactggctggggcgccctgcgcgaaggcggccccaccagcaatgctctgcagaaagtggacgtgcagttgatcccacaggacctgtgcagcgaggcctatcgctaccaggtgacgccacgcatgctgtgtgccggctaccgcaagggcaagaaggatgcctgccagggtgactcgggtggtccgctggtatgcaaggcactcagtggccgctggttcctggcagggctggtcagctggggcctgggctgtggccggcctaactacttcggcgtctacacccgcatcacaggtgtgatcggctggatccagcaagtggtgacctgaggaactgcccccctgcagagcaggtcccacctc

SEQ ID NO: 5 - DNA, 3188 bp, Macaca mulatta
  source 1..3188: mol_type = genomic DNA
cttgagccacacccagtccagctctggtgcctgccctctggggtgagctgccttgagatgcacttcgctcctctgtgaactgtctcggcacccacttccggtcactgccgcctgatgttgttactcttccactctgaaaggatgcctgtggccaaggccccccaggtggctggtgggcagggggacggaggtgatggcgaggaagcggagccagaggggatgttcgaggcccgtgaggactccaagagaaaagcccggggctacctccgcctggcgcccctgtggctgaccctggttgtgctgacttcagtgggggtgctactctggtatttcctagggtacaaggcggaggtgacggtcagccaggtgtactcaggcagcctgcgcgtgctcaatcgccacttctcccaggatcttacccgccgggaatccagtgccttccgcagtgaaaccgccaaagcccagaagatgctcaaggagctcatcgccagcacccgcctgggaacttattacaactccagctccgtctattcctttggggagggaccgctcacctgcttcttctggttcattctccaaatccccgagcaccgccggctgatgctgagccccgaggtggtgcaggcactgctggtggaggagctgctgtccacagtcaacagctcggcggctgtcccctacagggccgagtacgaagtggaccccgagggcctagtgatcctagaagccagtgtgaaagacatagctgcactgaattccacgctgggttgttaccgctacagctacgtgggccagggtcaggtcctccggctgaagggacccgaccacctggcctccagctgcctgtggcacctgcagggccccgaagacctcatgctgaaactccggctggagtggacgctggccgagtgccgggaccgactggccatgtatgacgtggctgggcccctggagaagaggctcatcacctcggtgtatggctgcagccgccaggagcctgtggtggaagtcctggcatcgggggccatcatggcggtggtctggaagaagggcctgcacagctactacgacccctttatgctctccgtgcagtcggtggtcttccaggcctgcgaggtaaacctgacgctggatgacaggctggactcccagggcgtcctcagcaccccgtacttccccagctactactcgccccgaacccactgctcctggcacctcacggtgccctctctggactacggcttggccctctggtttgacgcctacgcactgcggaggcagaagtatgatttgccgtgcacccagggccagtggacgatccagaacaggaggctgtgtggcctgcgcatcctgcagccttacgccgagaggatccccgtggtggccacggccggcatcaccatcaatttcacctcccagatctccctcacagggcctggtgtgcgggtgcactatggcttgtacaaccagtcggacccctgccctggagagttcctctgctctgtgaacggactctgcgtccctgcctgtgatggggtcaaggactgccccaacggcctggatgagagaaactgcgtttgcagagccacattccagtgccaagaggacagcacgtgcatctcactgcttaaggtctgtgacgggcagcctgactgtctcaacggcagcgatgaagagcggtgccaggaaggggtgccctgcgggacattcaccttccagtgtgaggaccagagctgcgtgaagaagcccaacccacagtgtgatgggcggcccgactgcagggacggctcagacgagcagcactgtgactgtggcctccagggcccctccagtcgcattgttggtggggccgtgtcctccgagggtgagtggccatggcaggccagcctccaggttcggggtcgacacatctgtgggggcgccctcatcgctgaccgctgggtgataacagctgcccattgcttccaggaggacagcatggcctccccggcgctgtggacggtgttcctgggcaaggtgtggcagaactcgcgctggcctggagaggtgtccttcaaggtgagccgcctactcctgcatccgtatcacgaagaggacagccacgactacgacgtggcgctgttgcagctcgaccacccggtggtgcgctcggccgccgtgcgtccagtctgcctgcccgcgcgctcccacttcttcgaacccggcctgcactgctggatcactggctggggcgccctgcgcgaaggcggccccaccagcaatgctctgcagaaagtggacgtgcagttgatcccacaggacctgtgcagcgaggcctatcgctaccaggtgacgccacgcatgctgtgtgccggctaccgcaagggcaagaaggatgcctgccagggtgactcgggtggtccgctggtatgcaaggcactcagtggccgctggttcctggcagggctggtcagctggggcctgggctgtggccggcctaactacttcggcgtctacacccgcatcacaggtgtgatcggctggatccagcaagtggtgacctgaggaactgcccccctgcagagcaggtcccacctcttggactcagagagcccagggcaattgccaagcagggggacaagtattctggggggaggggggcgcgagcaggccctgtggtggcaggaggtggcatcttgtcttgtccctgatgtctgctccagtgatggcaggaggatggaggagtgccagcagctgggggtcaagacgtcccctagggacccaggcccacacccagcccttctgcctcccgattctctctcctctgtccccttcctccactgctgcctattgcaaggaagtggctcagcagcaagaatgctggctctacgtccccaggagtgtctgagctgtgccccactctgtacagaggctgcttgggcagccttgcctctagagagcagatgccagcttcggaagcccctggtctaacttgggatctgggaatggaaggtgcccccataggaggggaccctcacagccccggggactgccaggtgggccggctgccaccgtaagccaaaaaaggtggggaagccctgactccaaggtccttgccccacccctgcctgccacctggcccctcacagcccagaccctcaccggcaggtgagctcagctgccctttggaataaagctgcctgatccaa

SEQ ID NO: 6 - DNA, 3212 bp, Homo sapiens
  source 1..3212: mol_type = genomic DNA
tttttttttttttttttttttgatcaggcagctttattccaaagggcagctgagctcacctcccagtgagggtctgggctgtgagggcccaggtggcaggcaggggtggggcaaggaccctggagtcaggacttccccaccttttggcttacagtggcagcaggcccacctggcagtctccagggctctgagggtcccctccgatgggagcaccttccattcccagatcccaagttagaccaggggcttccgaagctggaatctgctctctggaggcaaggctgcccaaacagcctctgtacagagtggggcgcacctcagacactcctcgggatgtagaaccagcattcttgctgctgagccactgccttgcattaggcagcagtggaggaaggggacggaggagagagaattgggaggcagaagggctgggtgtgggcctgggtcctcaggggacgtcttgacccccagctgctggcacttctccatcctcctgccatcactggagcagacatcagggacgagacaagatgccacctcctgccaccacagggcctgctctctcccccaccccccgccagaatacttgtccccctgcttggcagttgccctgggctctctgagtccaggaggtgggccctgctttgcaggggggcagttcctcaggtcaccacttgctggatccagctgatcacacctgtgatgcgggtgtagacgccgaagtagttaggccggccacagcccaggccccagctgaccagccccgccaggaaccagcggccactgagtgccttgcacaccagcggaccacctgagtcaccctgacaggcatccttcttgcccttgcggtagccggcacacagcatgcgtggcgtcacctggtagcgatagacctcgctgcacaggtcctgtgggatcaactgcacatccactttctgcagagcgttgctgatggggccgccctcgcgcaaggcgccccagcccgtaatccagcagtgcaggccgggctcgaagaagtgggagcgcgcgggcaggcagacggggcgcacggcggccgagcgcaccaccgggtggtcgagctgcagcagcgccacgtcgtagtcatggctgtcctcttcgtggtacgggtgcaggagcaggcggctcaccttgaaggacacctctccaggccagcgcgagttctgccacaccttgcccaggaacacggtccacagcaccgtggaggccatgctgtcctcctggaagcagtgggcagctgttatcacccagcggtcagcgatgagggcccccccacagatgtgtcgaccccgaacctggaggctggcctgccatggccactcaccctcggaggacacagctccaccaacaatgcggctggaggggccctggaggccacagtcacagtgctcctcatccgagccgtccctgcagtcgggccgcccatcacactgcgggttgggcttcttcacgcagctccggtcctcacactggaaggtgaatgtcccacatggcaccccttcctggcactgctcttcgtcgctgccgttgagacaatcaggctgcccatcacagaccttgggcagtgagatgcatgtgctgtcctctttgcactggaatgtggctctgcaaacgcagtttctctcatccaggccgttggggcagtccttgaccccatcacaggcagggacacagagtccattcacagaacagaggaactctccagggcaggggtccgactggttgtacaagccatagtgcacccgcacaccgggcccggtgagggagatctgggaggtgaagttgatggtgatcccggccgtggccaccacggggatcctctcggcgtagggctgcaggatgcgcaagccacacagcctcctgttctggatcgtccactggccctgggtgcacggcaaatcatacttctgcctcctcagtgcataggcatcaaaccagagggccaagccgtagtccagagagggcaccgtgaggtgccaggagcagtgggtttggggcgagtagtagctggggaagtacggggtgctgaggacgccctgggagtcgagcctgttgtccagcgtcaggttcacttcacaggcctggaagaccaccggctgcacggagagcacgaaggggtcgtagtagctgtgcaggcccttcttccagacgaccgccatgatggcccccgacgccagaacctccaccacgggctcctggcggctgcagccgtacaccgaggtgatgagcctcttctccaggggcccggccacgtcatacatggccagtcggtcccggcactctgccagcgtccactccagccggagtttgagcatgaggtccttggggccctgcaggtgccacaggcagctggaggccaggtggtcaggccccttcagccggaggacctggccctggcccacgtagctgtagcggtaacaacccagcgtggaattcaatgcagctatgtctttcacactggcttccaggatcactaggccctcggggtccacttcgtactcggccctgtaggggacggcagccgagctgttgactgtggacagcagctcctccaccagcagtgcctgcaccacctcggggctcagcatcagccggcggtgctcggggatttggagaatgaaccagaagaagcaggtgaggggtccctccccaaaggaatagacggagctggagttgtagtaagttcccaggcgggtgctggtgatgagctccttgagcatcttctgggctttggcggtttcactgcggaaggcactagattcccggcgggtaagatcctgggagaagtggcgattgagtacacgcagactgcctgagtacacctggctgaccatcacctccgccttgtaccctaggaaataccagagtagcacccccgccgaagccagcacgagcagggccagcagcacaaacaggggcaccaggcggaggtagccccgggcttttctcttggagtcctcacaggccttgaacatcccctccggctccgcttcctcgccatcacctccgtccccctgcccgccagccacctggggggcctcggccacgggcatccttttggagtggaagagtaacaacatcaggcggcagtgactgcaagtgggtgccgagacagctcacagaggagggaagtgcatctcaggtcagctcgcaccagagggcaggcaccagagctggactgggtctggctcaag

SEQ ID NO: 7 - DNA, 3206 bp, Mus musculus
  source 1..3206: mol_type = genomic DNA
tttttttttttttttcagtgtcagggcttggtcaagtgctttattcccagaacagacagtgggcctccagtgaatggcagggaggcccctgtagcaggcagagcttcagcaggcatctgcagctgaggctgcccggtgatttggcttagagtacagcccacttggcagactcaagggctctgatagagccttgatagaggcaccttctttctctgtgcagttcccccaagaggcttttgcaaggggaaggattctttctttcctacagagacccggaggccaaggtcatggccgccagaccccactccaaaacagtggtaggagcagggaggggaaaggactagaataagaaagggttagaagtgaaacctagccgaggctggcccctggacctcaggaggcatcctaaccaccagctgacatccttctctgtactgtcactggggtaggcctgagggaaacaggccttagcagggtcacttgccccagaatacttgtgtcctggctgggtggacaccctgaacttggcctggaggcaggtccagctctgtagaacagccctcaggtcagcacctgctggatccagttgatcacacgtgtgacacgggtgtagacgccaaagaaattgggtcggccacagcccaggccccagctaaccaaccctgccaggaaccagcggccactgggctccctgcaaaccagtgggcctccagagtcaccctggcaggcatctttcttgcccttgcggtagccagcacagagcatgcgtggggacacctggtagcggtaggcctcactgcagaggtcctgagggaccagctgtacgtccaccttctgcagggtgttgctcaccggaccaccctctcgctgggctccccagcctgtgatccagcagtgctggcctggctcaaagaagtgggagcgggcaggcaggcagacggggcgcacagtggccgagtacaccacggggtggtcgagctgcagcagggccacgtcgtagtcatggctgtcctcctcgtggtacgggtgcaggaacagacggctcaccttgaaggacacctcgcctggccagcgcgagttctgccgcatctttcccaggaacacggtccacagcttcggggaggccatgctgtcctcctggaagcagtgggcggccgttatgacccagcggtcagcgatgagagcccccccacagatgtgtcgaccccgaatctggaggctggcctgccatggccactcaccctcggaggacacggtcccgcccacaatacggctggagaggccctggaggccacagtcacagtgttgctcatctgagccgtctctgcaatctgactggccgtcacactctgggttgggcttcttcacacagctccggtcctcacactggaaagtgaatgtcccacagggcactccttcttggcactgttcttcgtcactgccattgagacagtcgggctgccggtcacagactctaggcagtgaaatgcacgtgctgtcctcttggcactggaacatggctctgcagacacagtttctctcatccaggccattggggcagtccttgatcccgtcacacgcagggacacacagtccattcacagagcagaggaactcaccagggcaggggtctgattggttgtacaagctgtagtacacttgcacacccgggcctgtgagggagatctgggaggtgaagttgatggtgacaccatctgaggccaccatggggatcctctcagcatatggctgcagggtacggaagccacacagcctcctgttctggatcatccactggccctgagtacacagtcggttgtacttctgcctcctcagtgcgtaggcatcgaaccagagcgccaagccgtagtccagagagggtaccgtgagatgccaggagcagtgggtactgggagagtagtaactggggtagtagggtgtacggaggaagccctgtgtgtccagccggccctccagtgtcaggttcacctggcagtcctggaaggccacagacttcactgagagcaggaaagggtcatagtagctatgcatgccctttttccacaccacggccatgacggagcccgatgccagcacctccatcacaggttcctggcggctgcacccatagaccgaggtgataagtctcttctccaggggcccagctgcgtcgtacatcgccaccctgtctctgcaatcgacccgggtccactccagccgcactttgatcatgaggtcttcgggcccttgcagatgccacaggcagcttgtggtctgctggtcaggccccttcaatgggaggacctggcctgggttcacatagctgtagcgataacagcccagcgtggaattcagtacgactatgtcgttcacactggcttccaggatcaccaggccttccgggtccacctcatattcggtcttataggaagccagggttgagctgttggacagtagctcatccaccaggagctcgcgcactacttcagggctcagggtcagtcgctggtactcagggatgtcaaggataaaccagaagaagcaggtgaggggtccctccccaaaggagtagacagaactagagttgtagtaagtacccaggcgggtgctggcaaccagttcttggagcatcttctgggctttggcagattcactgcggaaagcaatagactcccgtcggcccaggtcctgggagaaatgacggttgagcacccggaggctgccagagtacacctggcttacggtcacttccgctttgtaccctaggaaataccaaagcatgacccctgctgagaccagcgcagccaagaccagcaacagtggcgtgaagcggacgtagtcccggttttttctcttggtgttttttgggggcttgaacttcccctctggctcagcagcttcctctccatcacccgcatcgccctgaccatcagccgcttgggggacctcggtggtgggcatcctggtagaacaggggagctggaaacatctcggcatcttcaagagtggaaggtaggtgccgggcctgcacacaggcctggaggcctctgtttatccaggccaaggtctttccacccccaactggccagcttaggttggatcaatggcctggagccatggctggggtgtctggcccttgtcccttgtggcctgtggccccaagttccatgggcctctcctgtcaggtccagggcgacaatgaaact

SEQ ID NO: 8 - DNA, 2999 bp, Rattus norvegicus
  source 1..2999: mol_type = genomic DNA
gcttggccaactgctttatttccggaacagacagtgggcctccagtgaatggcagggagggccctgtagcaggcagagcacagcaggcacccgcagctgaggctgccccatgatttggcttacggtatggccctacttggcagtctcaagggctctgacagagccttgatagaggcaccttctttctcggatccagttccccctagaggcttttgcaaggggaaggaatcttactttcccacagaccttggaaccagcatcattgccaccagaccccaccccaaaacagcagtaggaggggagaggggaaaggactagaataagaaagggttggaagtgaagccgagctgaggctagcccctggaggcatcctaaccaccagctgacatccttctctgtactgtccctggggtaggcatgaggggacaggccttagcagggtcgctcgccccagaatacttgtgccctggctgggtggtcacctgggctccttgcaaaccagtgggcctccagagtcgccctggcaggcatctttcttgcccttgcgataaccagcacagagcatgcgtggggtcacctggtaacggtaggcctcattgcacaggtcctgagggatcagttgcacatccaccttctgaagggtgctgctaccaggaccaccctctcgctgggctccccagcctgtgatccagcagtgctggcctggctcaaagaagtgagagcgtgcgggcaggcagacggggcgcacggtggccgagtacaccacagggtggtccagctgcagcagggccacgtcgtagtcatggctgtcctcctcatgatacgggtgcaggaacaggcggctcaccttgaaggacacctcgcccggccagcgtgaattctgccgcatctttcccagaaacacggtccacagcctcggggaggccatgctgtcctcctggaagcagtgagcggctgttatgacccagcggtcagcgatgagagcccccccacagatgtgtcgaccccgaatctggagactggcctgccagggccactcaccctccgaggacatggccccgcccacaatgcggctggaggggccctggaggccacagtcacagtgctcctcatccgagccatccctgcagtctgcctgcccgtcacactcggggttgggcttcttcacacagctccggtcctcacactggaaagtgaatgtcccacagggcactccttcttggcactgctcttcgtcgctaccattgagacagtcgggctgccggtcacagactctcggcagtgagatgcacgtgctgtcctcttggcactggaacatggctctgcagacacagttcctctcatccaggccgttggggcagtccttgattccgtcacaagcagggacacacaatccattcacagagcagaggaactctccagggcaggggtctgattggttgtacaagctgtagtacacttgcacacccgggcctgtgagggagatctgggaggtgaagttgatggtgataccatccgaggccaccacggggatcctctcagcatatggctgcagggtacggaagccacatagcctcctgttctggatcatccactggccctgagtacatagtaggttgtacttctgcctcctcagtgcataggcgtcaaaccagagtgccaagccatagtccagagagggaaccgtgagatgccaggagcagtgggtactgggcgagtagtaactggggtagtagggtgtacggaggaagccctgtggatccagccggccttccagggtcaggttcacctggcagtcctggaaggccacagacttcactgagagcagaaaagggtcatagaagctatgcaagcccttcttccacaccacggccatgacagagcccgacgccagcacctccatcacgggttcctggcggctgcacccatagaccgaggtgataagtctcttctccaggggcccagctgcgtcgtacatcgccaccctgtctctgcaatcaacccgagtccactctagctgcactttgagcatgaggtcctcgggcccctgcaggtgccacaggcagctagtggtctgctggtcgggccccctcaaccggaggacctggcccgggttcacgtagctgtagcggtaacagcccagcgtggaattcagtacgactatgtcgttcacgctggcttctagtatcaccaggccttccgggtccacctcatattcggtcctataggaagccaaggctgagctgttggacagtagctcacccaccaggagctcgcgcaccacctcagggctcagggtcagtcgctggtactcggggatgtcaaggatgaaccagaagaagcagataaggggtccctccccaaaggcgtagatggaactggagttgtagtaagtacccaagcgggtgctggcaaccagctcttggaacatcttctgggctttggcagtttcagtgcggaaagcaatagactcccgtcgggccaagtcctgtgaaaaatggcggttgagcacccggaggctgccagagtacacctggcttatggtcacttccgccttgtaccctaggaaataccagagcatgactcctgccgaagccaacgcagccaagaccagcaacagtggtgtgaagcggacgtagtccctgtcttttctcttggcgtttctgggggccttgaacaccccctctggctctgcagcttcctctccatcacctccatcaccctgaccaccagctgcttggggaacctcagcggtgggcatcctggtagaacaggggagctggaaacatcttggcatcttcaagagtggaaggtaggtgctgggcctgaacacaggcctggaggcctctgtttatccaggccaaggtctctccacccacaactggccagcttaggttggatcaatagcctggaaccatgactggggtgtctggcccttgtccctcgtggcctgtggccccaagttccatgggcctcctgtcaggtccaggacggacaat

SEQ ID NO: 9 - DNA, 2440 bp, Macaca mulatta
  source 1..2440: mol_type = genomic DNA
gaggtgggacctgctctgcaggggggcagttcctcaggtcaccacttgctggatccagccgatcacacctgtgatgcgggtgtagacgccgaagtagttaggccggccacagcccaggccccagctgaccagccctgccaggaaccagcggccactgagtgccttgcataccagcggaccacccgagtcaccctggcaggcatccttcttgcccttgcggtagccggcacacagcatgcgtggcgtcacctggtagcgataggcctcgctgcacaggtcctgtgggatcaactgcacgtccactttctgcagagcattgctggtggggccgccttcgcgcagggcgccccagccagtgatccagcagtgcaggccgggttcgaagaagtgggagcgcgcgggcaggcagactggacgcacggcggccgagcgcaccaccgggtggtcgagctgcaacagcgccacgtcgtagtcgtggctgtcctcttcgtgatacggatgcaggagtaggcggctcaccttgaaggacacctctccaggccagcgcgagttctgccacaccttgcccaggaacaccgtccacagcgccggggaggccatgctgtcctcctggaagcaatgggcagctgttatcacccagcggtcagcgatgagggcgcccccacagatgtgtcgaccccgaacctggaggctggcctgccatggccactcaccctcggaggacacggccccaccaacaatgcgactggaggggccctggaggccacagtcacagtgctgctcgtctgagccgtccctgcagtcgggccgcccatcacactgtgggttgggcttcttcacgcagctctggtcctcacactggaaggtgaatgtcccgcagggcaccccttcctggcaccgctcttcatcgctgccgttgagacagtcaggctgcccgtcacagaccttaagcagtgagatgcacgtgctgtcctcttggcactggaatgtggctctgcaaacgcagtttctctcatccaggccgttggggcagtccttgaccccatcacaggcagggacgcagagtccgttcacagagcagaggaactctccagggcaggggtccgactggttgtacaagccatagtgcacccgcacaccaggccctgtgagggagatctgggaggtgaaattgatggtgatgccggccgtggccaccacggggatcctctcggcgtaaggctgcaggatgcgcaggccacacagcctcctgttctggatcgtccactggccctgggtgcacggcaaatcatacttctgcctccgcagtgcgtaggcgtcaaaccagagggccaagccgtagtccagagagggcaccgtgaggtgccaggagcagtgggttcggggcgagtagtagctggggaagtacggggtgctgaggacgccctgggagtccagcctgtcatccagcgtcaggtttacctcgcaggcctggaagaccaccgactgcacggagagcataaaggggtcgtagtagctgtgcaggcccttcttccagaccaccgccatgatggcccccgatgccaggacttccaccacaggctcctggcggctgcagccatacaccgaggtgatgagcctcttctccaggggcccagccacgtcatacatggccagtcggtcccggcactcggccagcgtccactccagccggagtttcagcatgaggtcttcggggccctgcaggtgccacaggcagctggaggccaggtggtcgggtcccttcagccggaggacctgaccctggcccacgtagctgtagcggtaacaacccagcgtggaattcagtgcagctatgtctttcacactggcttctaggatcactaggccctcggggtccacttcgtactcggccctgtaggggacagccgccgagctgttgactgtggacagcagctcctccaccagcagtgcctgcaccacctcggggctcagcatcagccggcggtgctcggggatttggagaatgaaccagaagaagcaggtgagcggtccctccccaaaggaatagacggagctggagttgtaataagttcccaggcgggtgctggcgatgagctccttgagcatcttctgggctttggcggtttcactgcggaaggcactggattcccggcgggtaagatcctgggagaagtggcgattgagcacgcgcaggctgcctgagtacacctggctgaccgtcacctccgccttgtaccctaggaaataccagagtagcacccccactgaagtcagcacaaccagggtcagccacaggggcgccaggcggaggtagccccgggcttttctcttggagtcctcacgggcctcgaacatcccctctggctccgcttcctcgccatcacctccgtccccctgcccaccagccacctggggggccttggccacaggcatcctg

SEQ ID NO: 10 - DNA, 3188 bp, Macaca mulatta
  source 1..3188: mol_type = genomic DNA
ttggatcaggcagctttattccaaagggcagctgagctcacctgccggtgagggtctgggctgtgaggggccaggtggcaggcaggggtggggcaaggaccttggagtcagggcttccccaccttttttggcttacggtggcagccggcccacctggcagtccccggggctgtgagggtcccctcctatgggggcaccttccattcccagatcccaagttagaccaggggcttccgaagctggcatctgctctctagaggcaaggctgcccaagcagcctctgtacagagtggggcacagctcagacactcctggggacgtagagccagcattcttgctgctgagccacttccttgcaataggcagcagtggaggaaggggacagaggagagagaatcgggaggcagaagggctgggtgtgggcctgggtccctaggggacgtcttgacccccagctgctggcactcctccatcctcctgccatcactggagcagacatcagggacaagacaagatgccacctcctgccaccacagggcctgctcgcgcccccctccccccagaatacttgtccccctgcttggcaattgccctgggctctctgagtccaagaggtgggacctgctctgcaggggggcagttcctcaggtcaccacttgctggatccagccgatcacacctgtgatgcgggtgtagacgccgaagtagttaggccggccacagcccaggccccagctgaccagccctgccaggaaccagcggccactgagtgccttgcataccagcggaccacccgagtcaccctggcaggcatccttcttgcccttgcggtagccggcacacagcatgcgtggcgtcacctggtagcgataggcctcgctgcacaggtcctgtgggatcaactgcacgtccactttctgcagagcattgctggtggggccgccttcgcgcagggcgccccagccagtgatccagcagtgcaggccgggttcgaagaagtgggagcgcgcgggcaggcagactggacgcacggcggccgagcgcaccaccgggtggtcgagctgcaacagcgccacgtcgtagtcgtggctgtcctcttcgtgatacggatgcaggagtaggcggctcaccttgaaggacacctctccaggccagcgcgagttctgccacaccttgcccaggaacaccgtccacagcgccggggaggccatgctgtcctcctggaagcaatgggcagctgttatcacccagcggtcagcgatgagggcgcccccacagatgtgtcgaccccgaacctggaggctggcctgccatggccactcaccctcggaggacacggccccaccaacaatgcgactggaggggccctggaggccacagtcacagtgctgctcgtctgagccgtccctgcagtcgggccgcccatcacactgtgggttgggcttcttcacgcagctctggtcctcacactggaaggtgaatgtcccgcagggcaccccttcctggcaccgctcttcatcgctgccgttgagacagtcaggctgcccgtcacagaccttaagcagtgagatgcacgtgctgtcctcttggcactggaatgtggctctgcaaacgcagtttctctcatccaggccgttggggcagtccttgaccccatcacaggcagggacgcagagtccgttcacagagcagaggaactctccagggcaggggtccgactggttgtacaagccatagtgcacccgcacaccaggccctgtgagggagatctgggaggtgaaattgatggtgatgccggccgtggccaccacggggatcctctcggcgtaaggctgcaggatgcgcaggccacacagcctcctgttctggatcgtccactggccctgggtgcacggcaaatcatacttctgcctccgcagtgcgtaggcgtcaaaccagagggccaagccgtagtccagagagggcaccgtgaggtgccaggagcagtgggttcggggcgagtagtagctggggaagtacggggtgctgaggacgccctgggagtccagcctgtcatccagcgtcaggtttacctcgcaggcctggaagaccaccgactgcacggagagcataaaggggtcgtagtagctgtgcaggcccttcttccagaccaccgccatgatggcccccgatgccaggacttccaccacaggctcctggcggctgcagccatacaccgaggtgatgagcctcttctccaggggcccagccacgtcatacatggccagtcggtcccggcactcggccagcgtccactccagccggagtttcagcatgaggtcttcggggccctgcaggtgccacaggcagctggaggccaggtggtcgggtcccttcagccggaggacctgaccctggcccacgtagctgtagcggtaacaacccagcgtggaattcagtgcagctatgtctttcacactggcttctaggatcactaggccctcggggtccacttcgtactcggccctgtaggggacagccgccgagctgttgactgtggacagcagctcctccaccagcagtgcctgcaccacctcggggctcagcatcagccggcggtgctcggggatttggagaatgaaccagaagaagcaggtgagcggtccctccccaaaggaatagacggagctggagttgtaataagttcccaggcgggtgctggcgatgagctccttgagcatcttctgggctttggcggtttcactgcggaaggcactggattcccggcgggtaagatcctgggagaagtggcgattgagcacgcgcaggctgcctgagtacacctggctgaccgtcacctccgccttgtaccctaggaaataccagagtagcacccccactgaagtcagcacaaccagggtcagccacaggggcgccaggcggaggtagccccgggcttttctcttggagtcctcacgggcctcgaacatcccctctggctccgcttcctcgccatcacctccgtccccctgcccaccagccacctggggggccttggccacaggcatcctttcagagtggaagagtaacaacatcaggcggcagtgaccggaagtgggtgccgagacagttcacagaggagcgaagtgcatctcaaggcagctcaccccagagggcaggcaccagagctggactgggtgtggctcaag

SEQ ID NO: 11 - protein, 16 aa, unidentified
  REGION 1..16: note = source = /note="Description of Unknown: Exemplary hydrophobic membrane translocation peptide"
AAVALLPAVLLALLAP

SEQ ID NO: 12 - protein, 11 aa, unidentified
  REGION 1..11: note = source = /note="Description of Unknown: RFGF analogue peptide"
AALLPVLLAAP

SEQ ID NO: 13 - protein, 13 aa, Human immunodeficiency virus
GRKKRRQRRRPPQ

SEQ ID NO: 14 - protein, 16 aa, Drosophila sp.
RQIKIWFQNRRMKWKK

SEQ ID NO: 15 - DNA, 21 bp, synthetic construct
  source 1..21: mol_type = other DNA
  modified_base 1: mod_base = OTHER; note = 2'-O-methylcytidine-3'-phosphate
  modified_base 2: mod_base = OTHER; note = 2'-O-methyluridine-3'-phosphate
  modified_base 3: mod_base = OTHER; note = 2'-O-methyluridine-3'-phosphate
  modified_base 4: mod_base = OTHER; note = adenosine-3'-phosphate
  modified_base 5: mod_base = OTHER; note = 2'-O-methylcytidine-3'-phosphate
  modified_base 6: mod_base = OTHER; note = guanosine-3'-phosphate
  modified_base 7: mod_base = OTHER; note = 2'-O-methylcytidine-3'-phosphate
  modified_base 8: mod_base = OTHER; note = 2'-O-methyluridine-3'-phosphate
  modified_base 9: mod_base = OTHER; note = guanosine-3'-phosphate
  modified_base 10: mod_base = OTHER; note = adenosine-3'-phosphate
  modified_base 11: mod_base = OTHER; note = guanosine-3'-phosphate
  modified_base 12: mod_base = OTHER; note = 2'-O-methyluridine-3'-phosphate
  modified_base 13: mod_base = OTHER; note = adenosine-3'-phosphate
  modified_base 14: mod_base = OTHER; note = 2'-O-methylcytidine-3'-phosphate
  modified_base 15: mod_base = OTHER; note = 2'-O-methyluridine-3'-phosphate
  modified_base 16: mod_base = OTHER; note = 2'-O-methyluridine-3'-phosphate
  modified_base 17: mod_base = OTHER; note = 2'-O-methylcytidine-3'-phosphate
  modified_base 18: mod_base = OTHER; note = guanosine-3'-phosphate
  modified_base 19: mod_base = OTHER; note = adenosine-3'-phosphate
  modified_base 20: mod_base = OTHER; note = 2'-deoxythymidine-3'-phosphorothioate
  misc_feature 1..19: note = RNA
  misc_feature 20..21: note = DNA
cttacgctgagtacttcgatt

SEQ ID NO: 16 - DNA, 21 bp, synthetic construct
  source 1..21: mol_type = other DNA
  modified_base 1: mod_base = OTHER; note = uridine-3'-phosphate
  modified_base 2: mod_base = OTHER; note = cytidine-3'-phosphate
  modified_base 3: mod_base = OTHER; note = guanosine-3'-phosphate
  modified_base 4: mod_base = OTHER; note = adenosine-3'-phosphate
  modified_base 5: mod_base = OTHER; note = adenosine-3'-phosphate
  modified_base 6: mod_base = OTHER; note = guanosine-3'-phosphate
  modified_base 7: mod_base = OTHER; note = 2'-O-methyluridine-3'-phosphate
  modified_base 8: mod_base = OTHER; note = adenosine-3'-phosphate
  modified_base 9: mod_base = OTHER; note = cytidine-3'-phosphate
  modified_base 10: mod_base = OTHER; note = uridine-3'-phosphate
  modified_base 11: mod_base = OTHER; note = 2'-O-methylcytidine-3'-phosphate
  modified_base 12: mod_base = OTHER; note = adenosine-3'-phosphate
  modified_base 13: mod_base = OTHER; note = guanosine-3'-phosphate
  modified_base 14: mod_base = OTHER; note = cytidine-3'-phosphate
  modified_base 15: mod_base = OTHER; note = guanosine-3'-phosphate
  modified_base 16: mod_base = OTHER; note = 2'-O-methyluridine-3'-phosphate
  modified_base 17: mod_base = OTHER; note = adenosine-3'-phosphate
  modified_base 18: mod_base = OTHER; note = adenosine-3'-phosphate
  modified_base 19: mod_base = OTHER; note = guanosine-3'-phosphate
  modified_base 20: mod_base = OTHER; note = 2'-deoxythymidine-3'-phosphorothioate
  misc_feature 1..19: note = RNA
  misc_feature 20..21: note = DNA
tcgaagtactcagcgtaagtt

SEQ ID NO: 17 - RNA, 21 nt, synthetic construct
  source 1..21: mol_type = other RNA
  modified_base 1: mod_base = OTHER; note = 2'-deoxy-2'-fluorouridine-3'-phosphorothioate
  modified_base 2: mod_base = OTHER; note = 2'-O-methylguanosine-3'-phosphorothioate
  modified_base 3: mod_base = OTHER; note = 2'-deoxy-2'-fluoroguanosine-3'-phosphate
  modified_base 4: mod_base = OTHER; note = 2'-O-methylcytidine-3'-phosphate
  modified_base 5: mod_base = OTHER; note = 2'-deoxy-2'-fluorocytidine-3'-phosphate
  modified_base 6: mod_base = OTHER; note = 2'-O-methyluridine-3'-phosphate
  modified_base 7: mod_base = OTHER; note = 2'-deoxy-2'-fluoroguanosine-3'-phosphate
  modified_base 8: mod_base = OTHER; note = 2'-O-methylguanosine-3'-phosphate
  modified_base 9: mod_base = OTHER; note = 2'-deoxy-2'-fluoroadenosine-3'-phosphate
  modified_base 10: mod_base = OTHER; note = 2'-deoxy-2'-fluoroguanosine-3'-phosphate
  modified_base 11: mod_base = OTHER; note = 2'-deoxy-2'-fluoroadenosine-3'-phosphate
  modified_base 12: mod_base = OTHER; note = 2'-O-methylguanosine-3'-phosphate
  modified_base 13: mod_base = OTHER; note = 2'-deoxy-2'-fluoroguanosine-3'-phosphate
  modified_base 14: mod_base = OTHER; note = 2'-O-methyluridine-3'-phosphate
  modified_base 15: mod_base = OTHER; note = 2'-deoxy-2'-fluoroguanosine-3'-phosphate
  modified_base 16: mod_base = OTHER; note = 2'-O-methyluridine-3'-phosphate
  modified_base 17: mod_base = OTHER; note = 2'-deoxy-2'-fluorocytidine-3'-phosphate
  modified_base 18: mod_base = OTHER; note = 2'-O-methylcytidine-3'-phosphate
  modified_base 19: mod_base = OTHER; note = 2'-deoxy-2'-fluorouridine-3'-phosphate
  modified_base 20: mod_base = OTHER; note = 2'-O-methyluridine-3'-phosphate
  modified_base 21: mod_base = OTHER; note = 2'-deoxy-2'-fluorocytidine-3'-phosphate ((2S,4R)-1-[29-[[2-(acetylamino)-2-deoxy-beta-D-galactopyra nosyl]oxy]-14,14-bis[[3-[[3-[[5-[[2-(acetylamino)-2-deoxy-b eta-D-galactopyranosyl]oxy]-1-oxopentyl]amino]propyl]amino] -3-oxopropoxy]methyl]-1,12,19,25-tetraoxo-16-oxa-13,20,24-t riazanonacos-1-yl]-4-hydroxy-2-pyrrolidinyl)methyl ester
tggcctggagaggtgtccttc

SEQ ID NO: 18 - RNA, 21 nt, synthetic construct
  source 1..21: mol_type = other RNA
  modified_base 1: mod_base = OTHER; note = 2'-deoxy-2'-fluoroguanosine-3'-phosphorothioate
  modified_base 2: mod_base = OTHER; note = 2'-O-methylguanosine-3'-phosphorothioate
  modified_base 3: mod_base = OTHER; note = 2'-deoxy-2'-fluoroguanosine-3'-phosphate
  modified_base 4: mod_base = OTHER; note = 2'-O-methylguanosine-3'-phosphate
  modified_base 5: mod_base = OTHER; note = 2'-deoxy-2'-fluorouridine-3'-phosphate
  modified_base 6: mod_base = OTHER; note = 2'-O-methylguanosine-3'-phosphate
  modified_base 7: mod_base = OTHER; note = 2'-deoxy-2'-fluorocytidine-3'-phosphate
  modified_base 8: mod_base = OTHER; note = 2'-O-methyluridine-3'-phosphate
  modified_base 9: mod_base = OTHER; note = 2'-deoxy-2'-fluoroadenosine-3'-phosphate
  modified_base 10: mod_base = OTHER; note = 2'-deoxy-2'-fluorocytidine-3'-phosphate
  modified_base 11: mod_base = OTHER; note = 2'-deoxy-2'-fluorouridine-3'-phosphate
  modified_base 12: mod_base = OTHER; note = 2'-O-methylcytidine-3'-phosphate
  modified_base 13: mod_base = OTHER; note = 2'-deoxy-2'-fluorouridine-3'-phosphate
  modified_base 14: mod_base = OTHER; note = 2'-O-methylguanosine-3'-phosphate
  modified_base 15: mod_base = OTHER; note = 2'-deoxy-2'-fluoroguanosine-3'-phosphate
  modified_base 16: mod_base = OTHER; note = 2'-O-methyluridine-3'-phosphate
  modified_base 17: mod_base = OTHER; note = 2'-deoxy-2'-fluoroadenosine-3'-phosphate
  modified_base 18: mod_base = OTHER; note = 2'-O-methyluridine-3'-phosphate
  modified_base 19: mod_base = OTHER; note = 2'-deoxy-2'-fluorouridine-3'-phosphate
  modified_base 20: mod_base = OTHER; note = 2'-O-methyluridine-3'-phosphate
  modified_base 21: mod_base = OTHER; note = 2'-deoxy-2'-fluorocytidine-3'-phosphate ((2S,4R)-1-[29-[[2-(acetylamino)-2-deoxy-beta-D-galactopyra nosyl]oxy]-14,14-bis[[3-[[3-[[5-[[2-(acetylamino)-2-deoxy-b eta-D-galactopyranosyl]oxy]-1-oxopentyl]amino]propyl]amino] -3-oxopropoxy]methyl]-1,12,19,25-tetraoxo-16-oxa-13,20,24-t riazanonacos-1-yl]-4-hydroxy-2-pyrrolidinyl)methyl ester
ggggtgctactctggtatttc

SEQ ID NO: 19 - RNA, 21 nt, synthetic construct
  source 1..21: mol_type = other RNA
  modified_base 1: mod_base = OTHER; note = 2'-deoxy-2'-fluorocytidine-3'-phosphorothioate
  modified_base 2: mod_base = OTHER; note = 2'-O-methyladenosine-3'-phosphorothioate
  modified_base 3: mod_base = OTHER; note = 2'-deoxy-2'-fluoroadenosine-3'-phosphate
  modified_base 4: mod_base = OTHER; note = 2'-O-methylcytidine-3'-phosphate
  modified_base 5: mod_base = OTHER; note = 2'-deoxy-2'-fluoroguanosine-3'-phosphate
  modified_base 6: mod_base = OTHER; note = 2'-O-methylguanosine-3'-phosphate
  modified_base 7: mod_base = OTHER; note = 2'-deoxy-2'-fluorocytidine-3'-phosphate
  modified_base 8: mod_base = OTHER; note = 2'-O-methylcytidine-3'-phosphate
  modified_base 9: mod_base = OTHER; note = 2'-deoxy-2'-fluorouridine-3'-phosphate
  modified_base 10: mod_base = OTHER; note = 2'-deoxy-2'-fluoroguanosine-3'-phosphate
  modified_base 11: mod_base = OTHER; note = 2'-deoxy-2'-fluoroguanosine-3'-phosphate
  modified_base 12: mod_base = OTHER; note = 2'-O-methyladenosine-3'-phosphate
  modified_base 13: mod_base = OTHER; note = 2'-deoxy-2'-fluorouridine-3'-phosphate
  modified_base 14: mod_base = OTHER; note = 2'-O-methylguanosine-3'-phosphate
  modified_base 15: mod_base = OTHER; note = 2'-deoxy-2'-fluoroadenosine-3'-phosphate
  modified_base 16: mod_base = OTHER; note = 2'-O-methylguanosine-3'-phosphate
  modified_base 17: mod_base = OTHER; note = 2'-deoxy-2'-fluoroadenosine-3'-phosphate
  modified_base 18: mod_base = OTHER; note = 2'-O-methylguanosine-3'-phosphate
  modified_base 19: mod_base = OTHER; note = 2'-deoxy-2'-fluoroadenosine-3'-phosphate
  modified_base 20: mod_base = OTHER; note = 2'-O-methyladenosine-3'-phosphate
  modified_base 21: mod_base = OTHER; note = 2'-deoxy-2'-fluoroadenosine-3'-phosphate ((2S,4R)-1-[29-[[2-(acetylamino)-2-deoxy-beta-D-galactopyra nosyl]oxy]-14,14-bis[[3-[[3-[[5-[[2-(acetylamino)-2-deoxy-b eta-D-galactopyranosyl]oxy]-1-oxopentyl]amino]propyl]amino] -3-oxopropoxy]methyl]-1,12,19,25-tetraoxo-16-oxa-13,20,24-t riazanonacos-1-yl]-4-hydroxy-2-pyrrolidinyl)methyl ester
caacggcctggatgagagaaa

SEQ ID NO: 20 - RNA, 21 nt, synthetic construct
  source 1..21: mol_type = other RNA
  modified_base 1: mod_base = OTHER; note = 2'-deoxy-2'-fluoroadenosine-3'-phosphorothioate
  modified_base 2: mod_base = OTHER; note = 2'-O-methyluridine-3'-phosphorothioate
  modified_base 3: mod_base = OTHER; note = 2'-deoxy-2'-fluorocytidine-3'-phosphate
  modified_base 4: mod_base = OTHER; note = 2'-O-methylguanosine-3'-phosphate
  modified_base 5: mod_base = OTHER; note = 2'-deoxy-2'-fluorocytidine-3'-phosphate
  modified_base 6: mod_base = OTHER; note = 2'-O-methylcytidine-3'-phosphate
  modified_base 7: mod_base = OTHER; note = 2'-deoxy-2'-fluoroadenosine-3'-phosphate
  modified_base 8: mod_base = OTHER; note = 2'-O-methylcytidine-3'-phosphate
  modified_base 9: mod_base = OTHER; note = 2'-deoxy-2'-fluorouridine-3'-phosphate
  modified_base 10: mod_base = OTHER; note = 2'-deoxy-2'-fluorouridine-3'-phosphate
  modified_base 11: mod_base = OTHER; note = 2'-deoxy-2'-fluorocytidine-3'-phosphate
  modified_base 12: mod_base = OTHER; note = 2'-O-methyluridine-3'-phosphate
  modified_base 13: mod_base = OTHER; note = 2'-deoxy-2'-fluorocytidine-3'-phosphate
  modified_base 14: mod_base = OTHER; note = 2'-O-methylcytidine-3'-phosphate
  modified_base 15: mod_base = OTHER; note = 2'-deoxy-2'-fluorocytidine-3'-phosphate
  modified_base 16: mod_base = OTHER; note = 2'-O-methyladenosine-3'-phosphate
  modified_base 17: mod_base = OTHER; note = 2'-deoxy-2'-fluoroguanosine-3'-phosphate
  modified_base 18: mod_base = OTHER; note = 2'-O-methylguanosine-3'-phosphate
  modified_base 19: mod_base = OTHER; note = 2'-deoxy-2'-fluoroadenosine-3'-phosphate
  modified_base 20: mod_base = OTHER; note = 2'-O-methyluridine-3'-phosphate
  modified_base 21: mod_base = OTHER; note = 2'-deoxy-2'-fluorocytidine-3'-phosphate ((2S,4R)-1-[29-[[2-(acetylamino)-2-deoxy-beta-D-galactopyra nosyl]oxy]-14,14-bis[[3-[[3-[[5-[[2-(acetylamino)-2-deoxy-b eta-D-galactopyranosyl]oxy]-1-oxopentyl]amino]propyl]amino] -3-oxopropoxy]methyl]-1,12,19,25-tetraoxo-16-oxa-13,20,24-t riazanonacos-1-yl]-4-hydroxy-2-pyrrolidinyl)methyl ester
atcgccacttctcccaggatc

SEQ ID NO: 21 - RNA, 21 nt, synthetic construct
  source 1..21: mol_type = other RNA
  modified_base 1: mod_base = OTHER; note = 2'-deoxy-2'-fluoroguanosine-3'-phosphorothioate
  modified_base 2: mod_base = OTHER; note = 2'-O-methylguanosine-3'-phosphorothioate
  modified_base 3: mod_base = OTHER; note = 2'-deoxy-2'-fluorouridine-3'-phosphate
  modified_base 4: mod_base = OTHER; note = 2'-O-methylguanosine-3'-phosphate
  modified_base 5: mod_base = OTHER; note = 2'-deoxy-2'-fluoroguanosine-3'-phosphate
  modified_base 6: mod_base = OTHER; note = 2'-O-methylcytidine-3'-phosphate
  modified_base 7: mod_base = OTHER; note = 2'-deoxy-2'-fluoroadenosine-3'-phosphate
  modified_base 8: mod_base = OTHER; note = 2'-O-methylguanosine-3'-phosphate
  modified_base 9: mod_base = OTHER; note = 2'-deoxy-2'-fluoroguanosine-3'-phosphate
  modified_base 10: mod_base = OTHER; note = 2'-deoxy-2'-fluoroadenosine-3'-phosphate
  modified_base 11: mod_base = OTHER; note = 2'-deoxy-2'-fluoroguanosine-3'-phosphate
  modified_base 12: mod_base = OTHER; note = 2'-O-methylguanosine-3'-phosphate
  modified_base 13: mod_base = OTHER; note = 2'-deoxy-2'-fluorouridine-3'-phosphate
  modified_base 14: mod_base = OTHER; note = 2'-O-methylguanosine-3'-phosphate
  modified_base 15: mod_base = OTHER; note = 2'-deoxy-2'-fluoroguanosine-3'-phosphate
  modified_base 16: mod_base = OTHER; note = 2'-O-methylcytidine-3'-phosphate
  modified_base 17: mod_base = OTHER; note = 2'-deoxy-2'-fluoroadenosine-3'-phosphate
  modified_base 18: mod_base = OTHER; note = 2'-O-methyluridine-3'-phosphate
  modified_base 19: mod_base = OTHER; note = 2'-deoxy-2'-fluorocytidine-3'-phosphate
  modified_base 20: mod_base = OTHER; note = 2'-O-methyluridine-3'-phosphate
  modified_base 21: mod_base = OTHER; note = 2'-deoxy-2'-fluorouridine-3'-phosphate ((2S,4R)-1-[29-[[2-(acetylamino)-2-deoxy-beta-D-galactopyra nosyl]oxy]-14,14-bis[[3-[[3-[[5-[[2-(acetylamino)-2-deoxy-b eta-D-galactopyranosyl]oxy]-1-oxopentyl]amino]propyl]amino] -3-oxopropoxy]methyl]-1,12,19,25-tetraoxo-16-oxa-13,20,24-t riazanonacos-1-yl]-4-hydroxy-2-pyrrolidinyl)methyl ester
ggtggcaggaggtggcatctt

SEQ ID NO: 22 - RNA, 21 nt, synthetic construct
  source 1..21: mol_type = other RNA
  modified_base 1: mod_base = OTHER; note = 2'-deoxy-2'-fluoroguanosine-3'-phosphorothioate
  modified_base 2: mod_base = OTHER; note = 2'-O-methyladenosine-3'-phosphorothioate
  modified_base 3: mod_base = OTHER; note = 2'-deoxy-2'-fluorocytidine-3'-phosphate
  modified_base 4: mod_base = OTHER; note = 2'-O-methylcytidine-3'-phosphate
  modified_base 5: mod_base = OTHER; note = 2'-deoxy-2'-fluoroguanosine-3'-phosphate
  modified_base 6: mod_base = OTHER; note = 2'-O-methyladenosine-3'-phosphate
  modified_base 7: mod_base = OTHER; note = 2'-deoxy-2'-fluorocytidine-3'-phosphate
  modified_base 8: mod_base = OTHER; note = 2'-O-methyluridine-3'-phosphate
  modified_base 9: mod_base = OTHER; note = 2'-deoxy-2'-fluoroguanosine-3'-phosphate
  modified_base 10: mod_base = OTHER; note = 2'-deoxy-2'-fluoroguanosine-3'-phosphate
  modified_base 11: mod_base = OTHER; note = 2'-deoxy-2'-fluorocytidine-3'-phosphate
  modified_base 12: mod_base = OTHER; note = 2'-O-methylcytidine-3'-phosphate
  modified_base 13: mod_base = OTHER; note = 2'-deoxy-2'-fluoroadenosine-3'-phosphate
  modified_base 14: mod_base = OTHER; note = 2'-O-methyluridine-3'-phosphate
  modified_base 15: mod_base = OTHER; note = 2'-deoxy-2'-fluoroguanosine-3'-phosphate
  modified_base 16: mod_base = OTHER; note = 2'-O-methyluridine-3'-phosphate
  modified_base 17: mod_base = OTHER; note = 2'-deoxy-2'-fluoroadenosine-3'-phosphate
  modified_base 18: mod_base = OTHER; note = 2'-O-methyluridine-3'-phosphate
  modified_base 19: mod_base = OTHER; note = 2'-deoxy-2'-fluoroguanosine-3'-phosphate
  modified_base 20: mod_base = OTHER; note = 2'-O-methyladenosine-3'-phosphate
  modified_base 21: mod_base = OTHER; note = 2'-deoxy-2'-fluorocytidine-3'-phosphate ((2S,4R)-1-[29-[[2-(acetylamino)-2-deoxy-beta-D-galactopyra nosyl]oxy]-14,14-bis[[3-[[3-[[5-[[2-(acetylamino)-2-deoxy-b eta-D-galactopyranosyl]oxy]-1-oxopentyl]amino]propyl]amino] -3-oxopropoxy]methyl]-1,12,19,25-tetraoxo-16-oxa-13,20,24-t riazanonacos-1-yl]-4-hydroxy-2-pyrrolidinyl)methyl ester
gaccgactggccatgtatgac

SEQ ID NO: 23 - RNA, 21 nt, synthetic construct
  source 1..21: mol_type = other RNA
  modified_base 1: mod_base = OTHER; note = 2'-deoxy-2'-fluoroguanosine-3'-phosphorothioate
  modified_base 2: mod_base = OTHER; note = 2'-O-methylguanosine-3'-phosphorothioate
  modified_base 3: mod_base = OTHER; note = 2'-deoxy-2'-fluorouridine-3'-phosphate
  modified_base 4: mod_base = OTHER; note = 2'-O-methylguanosine-3'-phosphate
  modified_base 5: mod_base = OTHER; note = 2'-deoxy-2'-fluorouridine-3'-phosphate
  modified_base 6: mod_base = OTHER; note = 2'-O-methylguanosine-3'-phosphate
  modified_base 7: mod_base = OTHER; note = 2'-deoxy-2'-fluorocytidine-3'-phosphate
  modified_base 8: mod_base = OTHER; note = 2'-O-methylguanosine-3'-phosphate
  modified_base 9: mod_base = OTHER; note = 2'-deoxy-2'-fluoroguanosine-3'-phosphate
  modified_base 10: mod_base = OTHER; note = 2'-deoxy-2'-fluoroguanosine-3'-phosphate
  modified_base 11: mod_base = OTHER; note = 2'-deoxy-2'-fluorouridine-3'-phosphate
  modified_base 12: mod_base = OTHER; note = 2'-O-methylguanosine-3'-phosphate
  modified_base 13: mod_base = OTHER; note = 2'-deoxy-2'-fluorocytidine-3'-phosphate
  modified_base 14: mod_base = OTHER; note = 2'-O-methyladenosine-3'-phosphate
  modified_base 15: mod_base = OTHER; note = 2'-deoxy-2'-fluorocytidine-3'-phosphate
  modified_base 16: mod_base = OTHER; note = 2'-O-methyluridine-3'-phosphate
  modified_base 17: mod_base = OTHER; note = 2'-deoxy-2'-fluoroadenosine-3'-phosphate
  modified_base 18: mod_base = OTHER; note = 2'-O-methyluridine-3'-phosphate
  modified_base 19: mod_base = OTHER; note = 2'-deoxy-2'-fluoroguanosine-3'-phosphate
  modified_base 20: mod_base = OTHER; note = 2'-O-methylguanosine-3'-phosphate
  modified_base 21: mod_base = OTHER; note = 2'-deoxy-2'-fluorocytidine-3'-phosphate ((2S,4R)-1-[29-[[2-(acetylamino)-2-deoxy-beta-D-galactopyra nosyl]oxy]-14,14-bis[[3-[[3-[[5-[[2-(acetylamino)-2-deoxy-b eta-D-galactopyranosyl]oxy]-1-oxopentyl]amino]propyl]amino] -3-oxopropoxy]methyl]-1,12,19,25-tetraoxo-16-oxa-13,20,24-t riazanonacos-1-yl]-4-hydroxy-2-pyrrolidinyl)methyl ester
ggtgtgcgggtgcactatggc

SEQ ID NO: 24 - RNA, 21 nt, synthetic construct
  source 1..21: mol_type = other RNA
  modified_base 1: mod_base = OTHER; note = 2'-deoxy-2'-fluoroguanosine-3'-phosphorothioate
  modified_base 2: mod_base = OTHER; note = 2'-O-methylguanosine-3'-phosphorothioate
  modified_base 3: mod_base = OTHER; note = 2'-deoxy-2'-fluorocytidine-3'-phosphate
  modified_base 4: mod_base = OTHER; note = 2'-O-methylcytidine-3'-phosphate
  modified_base 5: mod_base = OTHER; note = 2'-deoxy-2'-fluorouridine-3'-phosphate
  modified_base 6: mod_base = OTHER; note = 2'-O-methylguanosine-3'-phosphate
  modified_base 7: mod_base = OTHER; note = 2'-deoxy-2'-fluoroguanosine-3'-phosphate
  modified_base 8: mod_base = OTHER; note = 2'-O-methyladenosine-3'-phosphate
  modified_base 9: mod_base = OTHER; note = 2'-deoxy-2'-fluorouridine-3'-phosphate
  modified_base 10: mod_base = OTHER; note = 2'-deoxy-2'-fluoroguanosine-3'-phosphate
  modified_base 11: mod_base = OTHER; note = 2'-deoxy-2'-fluoroadenosine-3'-phosphate
  modified_base 12: mod_base = OTHER; note = 2'-O-methylguanosine-3'-phosphate
  modified_base 13: mod_base = OTHER; note = 2'-deoxy-2'-fluoroadenosine-3'-phosphate
  modified_base 14: mod_base = OTHER; note = 2'-O-methylguanosine-3'-phosphate
  modified_base 15: mod_base = OTHER; note = 2'-deoxy-2'-fluoroadenosine-3'-phosphate
  modified_base 16: mod_base = OTHER; note = 2'-O-methyladenosine-3'-phosphate
  modified_base 17: mod_base = OTHER; note = 2'-deoxy-2'-fluoroadenosine-3'-phosphate
  modified_base 18: mod_base = OTHER; note = 2'-O-methylcytidine-3'-phosphate
  modified_base 19: mod_base = OTHER; note = 2'-deoxy-2'-fluorouridine-3'-phosphate
  modified_base 20: mod_base = OTHER; note = 2'-O-methylguanosine-3'-phosphate
  modified_base 21: mod_base = OTHER; note = 2'-deoxy-2'-fluorocytidine-3'-phosphate ((2S,4R)-1-[29-[[2-(acetylamino)-2-deoxy-beta-D-galactopyra nosyl]oxy]-14,14-bis[[3-[[3-[[5-[[2-(acetylamino)-2-deoxy-b eta-D-galactopyranosyl]oxy]-1-oxopentyl]amino]propyl]amino] -3-oxopropoxy]methyl]-1,12,19,25-tetraoxo-16-oxa-13,20,24-t riazanonacos-1-yl]-4-hydroxy-2-pyrrolidinyl)methyl ester
ggcctggatgagagaaactgc

SEQ ID NO: 25 - RNA, 21 nt, synthetic construct
  source 1..21: mol_type = other RNA
  modified_base 1: mod_base = OTHER; note = 2'-deoxy-2'-fluorocytidine-3'-phosphorothioate
  modified_base 2: mod_base = OTHER; note = 2'-O-methyluridine-3'-phosphorothioate
  modified_base 3: mod_base = OTHER; note = 2'-deoxy-2'-fluorocytidine-3'-phosphate
  modified_base 4: mod_base = OTHER; note = 2'-O-methyluridine-3'-phosphate
  modified_base 5: mod_base = OTHER; note = 2'-deoxy-2'-fluoroguanosine-3'-phosphate
  modified_base 6: mod_base = OTHER; note = 2'-O-methylguanosine-3'-phosphate
  modified_base 7: mod_base = OTHER; note = 2'-deoxy-2'-fluorouridine-3'-phosphate
  modified_base 8: mod_base = OTHER; note = 2'-O-methyladenosine-3'-phosphate
  modified_base 9: mod_base = OTHER; note = 2'-deoxy-2'-fluorouridine-3'-phosphate
  modified_base 10: mod_base = OTHER; note = 2'-deoxy-2'-fluorouridine-3'-phosphate
  modified_base 11: mod_base = OTHER; note = 2'-deoxy-2'-fluorouridine-3'-phosphate
  modified_base 12: mod_base = OTHER; note = 2'-O-methylcytidine-3'-phosphate
  modified_base 13: mod_base = OTHER; note = 2'-deoxy-2'-fluorocytidine-3'-phosphate
  modified_base 14: mod_base = OTHER; note = 2'-O-methyluridine-3'-phosphate
  modified_base 15: mod_base = OTHER; note = 2'-deoxy-2'-fluoroadenosine-3'-phosphate
  modified_base 16: mod_base = OTHER; note = 2'-O-methylguanosine-3'-phosphate
  modified_base 17: mod_base = OTHER; note = 2'-deoxy-2'-fluoroguanosine-3'-phosphate
  modified_base 18: mod_base = OTHER; note = 2'-O-methylguanosine-3'-phosphate
  modified_base 19: mod_base = OTHER; note = 2'-deoxy-2'-fluorouridine-3'-phosphate
  modified_base 20: mod_base = OTHER; note = 2'-O-methyladenosine-3'-phosphate
  modified_base 21: mod_base = OTHER; note = 2'-deoxy-2'-fluorocytidine-3'-phosphate ((2S,4R)-1-[29-[[2-(acetylamino)-2-deoxy-beta-D-galactopyra nosyl]oxy]-14,14-bis[[3-[[3-[[5-[[2-(acetylamino)-2-deoxy-b eta-D-galactopyranosyl]oxy]-1-oxopentyl]amino]propyl]amino] -3-oxopropoxy]methyl]-1,12,19,25-tetraoxo-16-oxa-13,20,24-t riazanonacos-1-yl]-4-hydroxy-2-pyrrolidinyl)methyl ester
ctctggtatttcctagggtac

SEQ ID NO: 26 - RNA, 21 nt, synthetic construct
  source 1..21: mol_type = other RNA
  modified_base 1: mod_base = OTHER; note = 2'-deoxy-2'-fluoroguanosine-3'-phosphorothioate
  modified_base 2: mod_base = OTHER; note = 2'-O-methylcytidine-3'-phosphorothioate
  modified_base 3: mod_base = OTHER; note = 2'-deoxy-2'-fluorocytidine-3'-phosphate
  modified_base 4: mod_base = OTHER; note = 2'-O-methylcytidine-3'-phosphate
  modified_base 5: mod_base = OTHER; note = 2'-deoxy-2'-fluorocytidine-3'-phosphate
  modified_base 6: mod_base = OTHER; note = 2'-O-methyluridine-3'-phosphate
  modified_base 7: mod_base = OTHER; note = 2'-deoxy-2'-fluoroguanosine-3'-phosphate
  modified_base 8: mod_base = OTHER; note = 2'-O-methylguanosine-3'-phosphate
  modified_base 9: mod_base = OTHER; note = 2'-deoxy-2'-fluorouridine-3'-phosphate
  modified_base 10: mod_base = OTHER; note = 2'-deoxy-2'-fluorocytidine-3'-phosphate
  modified_base 11: mod_base = OTHER; note = 2'-deoxy-2'-fluorouridine-3'-phosphate
  modified_base 12: mod_base = OTHER; note = 2'-O-methyladenosine-3'-phosphate
  modified_base 13: mod_base = OTHER; note = 2'-deoxy-2'-fluoroadenosine-3'-phosphate
  modified_base 14: mod_base = OTHER; note = 2'-O-methylcytidine-3'-phosphate
  modified_base 15: mod_base = OTHER; note = 2'-deoxy-2'-fluorouridine-3'-phosphate
  modified_base 16: mod_base = OTHER; note = 2'-O-methyluridine-3'-phosphate
  modified_base 17: mod_base = OTHER; note = 2'-deoxy-2'-fluoroguanosine-3'-phosphate
  modified_base 18: mod_base = OTHER; note = 2'-O-methylguanosine-3'-phosphate
  modified_base 19: mod_base = OTHER; note = 2'-deoxy-2'-fluoroguanosine-3'-phosphate
  modified_base 20: mod_base = OTHER; note = 2'-O-methyladenosine-3'-phosphate
  modified_base 21: mod_base = OTHER; note = 2'-deoxy-2'-fluorouridine-3'-phosphate ((2S,4R)-1-[29-[[2-(acetylamino)-2-deoxy-beta-D-galactopyra nosyl]oxy]-14,14-bis[[3-[[3-[[5-[[2-(acetylamino)-2-deoxy-b eta-D-galactopyranosyl]oxy]-1-oxopentyl]amino]propyl]amino] -3-oxopropoxy]methyl]-1,12,19,25-tetraoxo-16-oxa-13,20,24-t riazanonacos-1-yl]-4-hydroxy-2-pyrrolidinyl)methyl ester
gcccctggtctaacttgggat

SEQ ID NO: 27 - RNA, 21 nt, synthetic construct
  source 1..21: mol_type = other RNA
  modified_base 1: mod_base = OTHER; note = 2'-deoxy-2'-fluoroguanosine-3'-phosphorothioate
  modified_base 2: mod_base = OTHER; note = 2'-O-methyladenosine-3'-phosphorothioate
  modified_base 3: mod_base = OTHER; note = 2'-deoxy-2'-fluoroguanosine-3'-phosphate
  modified_base 4: mod_base = OTHER; note = 2'-O-methylguanosine-3'-phosphate
  modified_base 5: mod_base = OTHER; note = 2'-deoxy-2'-fluorocytidine-3'-phosphate
  modified_base 6: mod_base = OTHER; note = 2'-O-methyladenosine-3'-phosphate
  modified_base 7: mod_base = OTHER; note = 2'-deoxy-2'-fluoroguanosine-3'-phosphate
  modified_base 8: mod_base = OTHER; note = 2'-O-methyladenosine-3'-phosphate
  modified_base 9: mod_base = OTHER; note = 2'-deoxy-2'-fluoroadenosine-3'-phosphate
  modified_base 10: mod_base = OTHER; note = 2'-deoxy-2'-fluoroguanosine-3'-phosphate
  modified_base 11: mod_base = OTHER; note = 2'-deoxy-2'-fluorouridine-3'-phosphate
  modified_base 12: mod_base = OTHER; note = 2'-O-methyladenosine-3'-phosphate
  modified_base 13: mod_base = OTHER; note = 2'-deoxy-2'-fluorouridine-3'-phosphate
  modified_base 14: mod_base = OTHER; note = 2'-O-methylguanosine-3'-phosphate
  modified_base 15: mod_base = OTHER; note = 2'-deoxy-2'-fluoroadenosine-3'-phosphate
  modified_base 16: mod_base = OTHER; note = 2'-O-methyluridine-3'-phosphate
  modified_base 17: mod_base = OTHER; note = 2'-deoxy-2'-fluorouridine-3'-phosphate
  modified_base 18: mod_base = OTHER; note = 2'-O-methyluridine-3'-phosphate
  modified_base 19: mod_base = OTHER; note = 2'-deoxy-2'-fluoroguanosine-3'-phosphate
  modified_base 20: mod_base = OTHER; note = 2'-O-methylcytidine-3'-phosphate
  modified_base 21: mod_base = OTHER; note = 2'-deoxy-2'-fluorocytidine-3'-phosphate ((2S,4R)-1-[29-[[2-(acetylamino)-2-deoxy-beta-D-galactopyra nosyl]oxy]-14,14-bis[[3-[[3-[[5-[[2-(acetylamino)-2-deoxy-b eta-D-galactopyranosyl]oxy]-1-oxopentyl]amino]propyl]amino] -3-oxopropoxy]methyl]-1,12,19,25-tetraoxo-16-oxa-13,20,24-t riazanonacos-1-yl]-4-hydroxy-2-pyrrolidinyl)methyl ester
gaggcagaagtatgatttgcc

SEQ ID NO: 28 - RNA, 21 nt, synthetic construct
  source 1..21: mol_type = other RNA
  modified_base 1: mod_base = OTHER; note = 2'-deoxy-2'-fluoroadenosine-3'-phosphorothioate
  modified_base 2: mod_base = OTHER; note = 2'-O-methyladenosine-3'-phosphorothioate
  modified_base 3: mod_base = OTHER; note = 2'-deoxy-2'-fluoroguanosine-3'-phosphate
  modified_base 4: mod_base = OTHER; note = 2'-O-methylcytidine-3'-phosphate
  modified_base 5: mod_base = OTHER; note = 2'-deoxy-2'-fluorocytidine-3'-phosphate
  modified_base 6: mod_base = OTHER; note = 2'-O-methyladenosine-3'-phosphate
  modified_base 7: mod_base = OTHER; note = 2'-deoxy-2'-fluoroguanosine-3'-phosphate
  modified_base 8: mod_base = OTHER; note = 2'-O-methyluridine-3'-phosphate
  modified_base 9: mod_base = OTHER; note = 2'-deoxy-2'-fluoroguanosine-3'-phosphate
  modified_base 10: mod_base = OTHER; note = 2'-deoxy-2'-fluorouridine-3'-phosphate
  modified_base 11: mod_base = OTHER; note = 2'-deoxy-2'-fluoroguanosine-3'-phosphate
  modified_base 12: mod_base = OTHER; note = 2'-O-methyladenosine-3'-phosphate
  modified_base 13: mod_base = OTHER; note = 2'-deoxy-2'-fluoroadenosine-3'-phosphate
  modified_base 14: mod_base = OTHER; note = 2'-O-methyladenosine-3'-phosphate
  modified_base 15: mod_base = OTHER; note = 2'-deoxy-2'-fluoroguanosine-3'-phosphate
  modified_base 16: mod_base = OTHER; note = 2'-O-methyladenosine-3'-phosphate
  modified_base 17: mod_base = OTHER; note = 2'-deoxy-2'-fluorocytidine-3'-phosphate
  modified_base 18: mod_base = OTHER; note = 2'-O-methyladenosine-3'-phosphate
  modified_base 19: mod_base = OTHER; note = 2'-deoxy-2'-fluorouridine-3'-phosphate
  modified_base 20: mod_base = OTHER; note = 2'-O-methyladenosine-3'-phosphate
  modified_base 21: mod_base = OTHER; note = 2'-deoxy-2'-fluoroguanosine-3'-phosphate ((2S,4R)-1-[29-[[2-(acetylamino)-2-deoxy-beta-D-galactopyra nosyl]oxy]-14,14-bis[[3-[[3-[[5-[[2-(acetylamino)-2-deoxy-b eta-D-galactopyranosyl]oxy]-1-oxopentyl]amino]propyl]amino] -3-oxopropoxy]methyl]-1,12,19,25-tetraoxo-16-oxa-13,20,24-t riazanonacos-1-yl]-4-hydroxy-2-pyrrolidinyl)methyl ester
aagccagtgtgaaagacatag

SEQ ID NO: 29 - RNA, 21 nt, synthetic construct
  source 1..21: mol_type = other RNA
  modified_base 1: mod_base = OTHER; note = 2'-deoxy-2'-fluoroguanosine-3'-phosphorothioate
  modified_base 2: mod_base = OTHER; note = 2'-O-methylcytidine-3'-phosphorothioate
  modified_base 3: mod_base = OTHER; note = 2'-deoxy-2'-fluorocytidine-3'-phosphate
  modified_base 4: mod_base = OTHER; note = 2'-O-methylguanosine-3'-phosphate
  modified_base 5: mod_base = OTHER; note = 2'-deoxy-2'-fluoroguanosine-3'-phosphate
  modified_base 6: mod_base = OTHER; note = 2'-O-methylguanosine-3'-phosphate
  modified_base 7: mod_base = OTHER; note = 2'-deoxy-2'-fluoroadenosine-3'-phosphate
  modified_base 8: mod_base = OTHER; note = 2'-O-methylcytidine-3'-phosphate
  modified_base 9: mod_base = OTHER; note = 2'-deoxy-2'-fluorocytidine-3'-phosphate
  modified_base 10: mod_base = OTHER; note = 2'-deoxy-2'-fluoroguanosine-3'-phosphate
  modified_base 11: mod_base = OTHER; note = 2'-deoxy-2'-fluoroadenosine-3'-phosphate
  modified_base 12: mod_base = OTHER; note = 2'-O-methylcytidine-3'-phosphate
  modified_base 13: mod_base = OTHER; note = 2'-deoxy-2'-fluorouridine-3'-phosphate
  modified_base 14: mod_base = OTHER; note = 2'-O-methylguanosine-3'-phosphate
  modified_base 15: mod_base = OTHER; note = 2'-deoxy-2'-fluoroguanosine-3'-phosphate
  modified_base 16: mod_base = OTHER; note = 2'-O-methylcytidine-3'-phosphate
  modified_base 17: mod_base = OTHER; note = 2'-deoxy-2'-fluorocytidine-3'-phosphate
  modified_base 18: mod_base = OTHER; note = 2'-O-methyladenosine-3'-phosphate
  modified_base 19: mod_base = OTHER; note = 2'-deoxy-2'-fluorouridine-3'-phosphate
  modified_base 20: mod_base = OTHER; note = 2'-O-methylguanosine-3'-phosphate
  modified_base 21: mod_base = OTHER; note = 2'-deoxy-2'-fluorouridine-3'-phosphate ((2S,4R)-1-[29-[[2-(acetylamino)-2-deoxy-beta-D-galactopyra nosyl]oxy]-14,14-bis[[3-[[3-[[5-[[2-(acetylamino)-2-deoxy-b eta-D-galactopyranosyl]oxy]-1-oxopentyl]amino]propyl]amino] -3-oxopropoxy]methyl]-1,12,19,25-tetraoxo-16-oxa-13,20,24-t riazanonacos-1-yl]-4-hydroxy-2-pyrrolidinyl)methyl ester
gccgggaccgactggccatgt

SEQ ID NO: 30 - RNA, 21 nt, synthetic construct
  source 1..21: mol_type = other RNA
  modified_base 1: mod_base = OTHER; note = 2'-deoxy-2'-fluorocytidine-3'-phosphorothioate
  modified_base 2: mod_base = OTHER; note = 2'-O-methyluridine-3'-phosphorothioate
  modified_base 3: mod_base = OTHER; note = 2'-deoxy-2'-fluorocytidine-3'-phosphate
  modified_base 4: mod_base = OTHER; note = 2'-O-methylcytidine-3'-phosphate
  modified_base 5: mod_base = OTHER; note = 2'-deoxy-2'-fluoroadenosine-3'-phosphate
  modified_base 6: mod_base = OTHER; note = 2'-O-methylguanosine-3'-phosphate
  modified_base 7: mod_base = OTHER; note = 2'-deoxy-2'-fluoroguanosine-3'-phosphate
  modified_base 8: mod_base = OTHER; note = 2'-O-methyluridine-3'-phosphate
  modified_base 9: mod_base = OTHER; note = 2'-deoxy-2'-fluorouridine-3'-phosphate
  modified_base 10: mod_base = OTHER; note = 2'-deoxy-2'-fluorocytidine-3'-phosphate
  modified_base 11: mod_base = OTHER; note = 2'-deoxy-2'-fluoroguanosine-3'-phosphate
  modified_base 12: mod_base = OTHER; note = 2'-O-methylguanosine-3'-phosphate
  modified_base 13: mod_base = OTHER; note = 2'-deoxy-2'-fluoroguanosine-3'-phosphate
  modified_base 14: mod_base = OTHER; note = 2'-O-methylguanosine-3'-phosphate
  modified_base 15: mod_base = OTHER; note = 2'-deoxy-2'-fluorouridine-3'-phosphate
  modified_base 16: mod_base = OTHER; note = 2'-O-methylcytidine-3'-phosphate
  modified_base 17: mod_base = OTHER; note = 2'-deoxy-2'-fluoroguanosine-3'-phosphate
  modified_base 18: mod_base = OTHER; note = 2'-O-methyladenosine-3'-phosphate
  modified_base 19: mod_base = OTHER; note = 2'-deoxy-2'-fluorocytidine-3'-phosphate
  modified_base 20: mod_base = OTHER; note = 2'-O-methyladenosine-3'-phosphate
  modified_base 21: mod_base = OTHER; note = 2'-deoxy-2'-fluorocytidine-3'-phosphate ((2S,4R)-1-[29-[[2-(acetylamino)-2-deoxy-beta-D-galactopyra nosyl]oxy]-14,14-bis[[3-[[3-[[5-[[2-(acetylamino)-2-deoxy-b eta-D-galactopyranosyl]oxy]-1-oxopentyl]amino]propyl]amino] -3-oxopropoxy]methyl]-1,12,19,25-tetraoxo-16-oxa-13,20,24-t riazanonacos-1-yl]-4-hydroxy-2-pyrrolidinyl)methyl ester
ctccaggttcggggtcgacac

SEQ ID NO: 31 - RNA, 21 nt, synthetic construct
  source 1..21: mol_type = other RNA
  modified_base 1: mod_base = OTHER; note = 2'-deoxy-2'-fluoroadenosine-3'-phosphorothioate
  modified_base 2: mod_base = OTHER; note = 2'-O-methylguanosine-3'-phosphorothioate
  modified_base 3: mod_base = OTHER; note = 2'-deoxy-2'-fluorocytidine-3'-phosphate
  modified_base 4: mod_base = OTHER; note = 2'-O-methylcytidine-3'-phosphate
  modified_base 5: mod_base = OTHER; note = 2'-deoxy-2'-fluorocytidine-3'-phosphate
  modified_base 6: mod_base = OTHER; note = 2'-O-methylcytidine-3'-phosphate
  modified_base 7: mod_base = OTHER; note = 2'-deoxy-2'-fluorouridine-3'-phosphate
  modified_base 8: mod_base = OTHER; note = 2'-O-methylguanosine-3'-phosphate
  modified_base 9: mod_base = OTHER; note = 2'-deoxy-2'-fluoroguanosine-3'-phosphate
  modified_base 10: mod_base = OTHER; note = 2'-deoxy-2'-fluorouridine-3'-phosphate
  modified_base 11: mod_base = OTHER; note = 2'-deoxy-2'-fluorocytidine-3'-phosphate
  modified_base 12: mod_base = OTHER; note = 2'-O-methyluridine-3'-phosphate
  modified_base 13: mod_base = OTHER; note = 2'-deoxy-2'-fluoroadenosine-3'-phosphate
  modified_base 14: mod_base = OTHER; note = 2'-O-methyladenosine-3'-phosphate
  modified_base 15: mod_base = OTHER; note = 2'-deoxy-2'-fluorocytidine-3'-phosphate
  modified_base 16: mod_base = OTHER; note = 2'-O-methyluridine-3'-phosphate
  modified_base 17: mod_base = OTHER; note = 2'-deoxy-2'-fluorouridine-3'-phosphate
  modified_base 18: mod_base = OTHER; note = 2'-O-methylguanosine-3'-phosphate
  modified_base 19: mod_base = OTHER; note = 2'-deoxy-2'-fluoroguanosine-3'-phosphate
  modified_base 20: mod_base = OTHER; note = 2'-O-methylguanosine-3'-phosphate
  modified_base 21: mod_base = OTHER; note = 2'-deoxy-2'-fluoroadenosine-3'-phosphate ((2S,4R)-1-[29-[[2-(acetylamino)-2-deoxy-beta-D-galactopyra nosyl]oxy]-14,14-bis[[3-[[3-[[5-[[2-(acetylamino)-2-deoxy-b eta-D-galactopyranosyl]oxy]-1-oxopentyl]amino]propyl]amino] -3-oxopropoxy]methyl]-1,12,19,25-tetraoxo-16-oxa-13,20,24-t riazanonacos-1-yl]-4-hydroxy-2-pyrrolidinyl)methyl ester
agcccctggtctaacttggga

SEQ ID NO: 32 - RNA, 21 nt, synthetic construct
  source 1..21: mol_type = other RNA
  modified_base 1: mod_base = OTHER; note = 2'-deoxy-2'-fluorouridine-3'-phosphorothioate
  modified_base 2: mod_base = OTHER; note = 2'-O-methylcytidine-3'-phosphorothioate
  modified_base 3: mod_base = OTHER; note = 2'-deoxy-2'-fluoroguanosine-3'-phosphate
  modified_base 4: mod_base = OTHER; note = 2'-O-methylcytidine-3'-phosphate
  modified_base 5: mod_base = OTHER; note = 2'-deoxy-2'-fluorocytidine-3'-phosphate
  modified_base 6: mod_base = OTHER; note = 2'-O-methyladenosine-3'-phosphate
  modified_base 7: mod_base = OTHER; note = 2'-deoxy-2'-fluorocytidine-3'-phosphate
  modified_base 8: mod_base = OTHER; note = 2'-O-methyluridine-3'-phosphate
  modified_base 9: mod_base = OTHER; note = 2'-deoxy-2'-fluorouridine-3'-phosphate
  modified_base 10: mod_base = OTHER; note = 2'-deoxy-2'-fluorocytidine-3'-phosphate
  modified_base 11: mod_base = OTHER; note = 2'-deoxy-2'-fluorouridine-3'-phosphate
  modified_base 12: mod_base = OTHER; note = 2'-O-methylcytidine-3'-phosphate
  modified_base 13: mod_base = OTHER; note = 2'-deoxy-2'-fluorocytidine-3'-phosphate
  modified_base 14: mod_base = OTHER; note = 2'-O-methylcytidine-3'-phosphate
  modified_base 15: mod_base = OTHER; note = 2'-deoxy-2'-fluoroadenosine-3'-phosphate
  modified_base 16: mod_base = OTHER; note = 2'-O-methylguanosine-3'-phosphate
  modified_base 17: mod_base = OTHER; note = 2'-deoxy-2'-fluoroguanosine-3'-phosphate
  modified_base 18: mod_base = OTHER; note = 2'-O-methyladenosine-3'-phosphate
  modified_base 19: mod_base = OTHER; note = 2'-deoxy-2'-fluorouridine-3'-phosphate
  modified_base 20: mod_base = OTHER; note = 2'-O-methylcytidine-3'-phosphate
  modified_base 21: mod_base = OTHER; note = 2'-deoxy-2'-fluorouridine-3'-phosphate ((2S,4R)-1-[29-[[2-(acetylamino)-2-deoxy-beta-D-galactopyra nosyl]oxy]-14,14-bis[[3-[[3-[[5-[[2-(acetylamino)-2-deoxy-b eta-D-galactopyranosyl]oxy]-1-oxopentyl]amino]propyl]amino] -3-oxopropoxy]methyl]-1,12,19,25-tetraoxo-16-oxa-13,20,24-t riazanonacos-1-yl]-4-hydroxy-2-pyrrolidinyl)methyl ester
tcgccacttctcccaggatct

SEQ ID NO: 33 - RNA, 21 nt, synthetic construct
  source 1..21: mol_type = other RNA
  modified_base 1: mod_base = OTHER; note = 2'-deoxy-2'-fluoroadenosine-3'-phosphorothioate
  modified_base 2: mod_base = OTHER; note = 2'-O-methylcytidine-3'-phosphorothioate
  modified_base 3: mod_base = OTHER; note = 2'-deoxy-2'-fluorouridine-3'-phosphate
  modified_base 4: mod_base = OTHER; note = 2'-O-methylcytidine-3'-phosphate
  modified_base 5: mod_base = OTHER; note = 2'-deoxy-2'-fluorouridine-3'-phosphate
  modified_base 6: mod_base = OTHER; note = 2'-O-methylguanosine-3'-phosphate
  modified_base 7: mod_base = OTHER; note = 2'-deoxy-2'-fluoroguanosine-3'-phosphate
  modified_base 8: mod_base = OTHER; note = 2'-O-methyluridine-3'-phosphate
  modified_base 9: mod_base = OTHER; note = 2'-deoxy-2'-fluoroadenosine-3'-phosphate
  modified_base 10: mod_base = OTHER; note = 2'-deoxy-2'-fluorouridine-3'-phosphate
  modified_base 11: mod_base = OTHER; note = 2'-deoxy-2'-fluorouridine-3'-phosphate
  modified_base 12: mod_base = OTHER; note = 2'-O-methyluridine-3'-phosphate
  modified_base 13: mod_base = OTHER; note = 2'-deoxy-2'-fluorocytidine-3'-phosphate
  modified_base 14: mod_base = OTHER; note = 2'-O-methylcytidine-3'-phosphate
  modified_base 15: mod_base = OTHER; note = 2'-deoxy-2'-fluorouridine-3'-phosphate
  modified_base 16: mod_base = OTHER; note = 2'-O-methyladenosine-3'-phosphate
  modified_base 17: mod_base = OTHER; note = 2'-deoxy-2'-fluoroguanosine-3'-phosphate
  modified_base 18: mod_base = OTHER; note = 2'-O-methylguanosine-3'-phosphate
  modified_base 19: mod_base = OTHER; note = 2'-deoxy-2'-fluoroguanosine-3'-phosphate
  modified_base 20: mod_base = OTHER; note = 2'-O-methyluridine-3'-phosphate
  modified_base 21: mod_base = OTHER; note = 2'-deoxy-2'-fluoroadenosine-3'-phosphate ((2S,4R)-1-[29-[[2-(acetylamino)-2-deoxy-beta-D-galactopyra nosyl]oxy]-14,14-bis[[3-[[3-[[5-[[2-(acetylamino)-2-deoxy-b eta-D-galactopyranosyl]oxy]-1-oxopentyl]amino]propyl]amino] -3-oxopropoxy]methyl]-1,12,19,25-tetraoxo-16-oxa-13,20,24-t riazanonacos-1-yl]-4-hydroxy-2-pyrrolidinyl)methyl ester
actctggtatttcctagggta

SEQ ID NO: 34 - RNA, 21 nt, synthetic construct
  source 1..21: mol_type = other RNA
  modified_base 1: mod_base = OTHER; note = 2'-deoxy-2'-fluorouridine-3'-phosphorothioate
  modified_base 2: mod_base = OTHER; note = 2'-O-methylcytidine-3'-phosphorothioate
  modified_base 3: mod_base = OTHER; note = 2'-deoxy-2'-fluoroguanosine-3'-phosphate
  modified_base 4: mod_base = OTHER; note = 2'-O-methylcytidine-3'-phosphate
  modified_base 5: mod_base = OTHER; note = 2'-deoxy-2'-fluorouridine-3'-phosphate
  modified_base 6: mod_base = OTHER; note = 2'-O-methylguanosine-3'-phosphate
  modified_base 7: mod_base = OTHER; note = 2'-deoxy-2'-fluoroadenosine-3'-phosphate
  modified_base 8: mod_base = OTHER; note = 2'-O-methylcytidine-3'-phosphate
  modified_base 9: mod_base = OTHER; note = 2'-deoxy-2'-fluorocytidine-3'-phosphate
  modified_base 10: mod_base = OTHER; note = 2'-deoxy-2'-fluoroguanosine-3'-phosphate
  modified_base 11: mod_base = OTHER; note = 2'-deoxy-2'-fluorocytidine-3'-phosphate
  modified_base 12: mod_base = OTHER; note = 2'-O-methyluridine-3'-phosphate
  modified_base 13: mod_base = OTHER; note = 2'-deoxy-2'-fluoroguanosine-3'-phosphate
  modified_base 14: mod_base = OTHER; note = 2'-O-methylguanosine-3'-phosphate
  modified_base 15: mod_base = OTHER; note = 2'-deoxy-2'-fluoroguanosine-3'-phosphate
  modified_base 16: mod_base = OTHER; note = 2'-O-methyluridine-3'-phosphate
  modified_base 17: mod_base = OTHER; note = 2'-deoxy-2'-fluoroguanosine-3'-phosphate
  modified_base 18: mod_base = OTHER; note = 2'-O-methyladenosine-3'-phosphate
  modified_base 19: mod_base = OTHER; note = 2'-deoxy-2'-fluorouridine-3'-phosphate
  modified_base 20: mod_base = OTHER; note = 2'-O-methyladenosine-3'-phosphate
  modified_base 21: mod_base = OTHER; note = 2'-deoxy-2'-fluoroadenosine-3'-phosphate ((2S,4R)-1-[29-[[2-(acetylamino)-2-deoxy-beta-D-galactopyra nosyl]oxy]-14,14-bis[[3-[[3-[[5-[[2-(acetylamino)-2-deoxy-b eta-D-galactopyranosyl]oxy]-1-oxopentyl]amino]propyl]amino] -3-oxopropoxy]methyl]-1,12,19,25-tetraoxo-16-oxa-13,20,24-t riazanonacos-1-yl]-4-hydroxy-2-pyrrolidinyl)methyl ester
tcgctgaccgctgggtgataa

SEQ ID NO: 35 - RNA, 21 nt, synthetic construct
  source 1..21: mol_type = other RNA
  modified_base 1: mod_base = OTHER; note = 2'-deoxy-2'-fluoroguanosine-3'-phosphorothioate
  modified_base 2: mod_base = OTHER; note = 2'-O-methylcytidine-3'-phosphorothioate
  modified_base 3: mod_base = OTHER; note = 2'-deoxy-2'-fluorocytidine-3'-phosphate
  modified_base 4: mod_base = OTHER; note = 2'-O-methylcytidine-3'-phosphate
  modified_base 5: mod_base = OTHER; note = 2'-deoxy-2'-fluorocytidine-3'-phosphate
  modified_base 6: mod_base = OTHER; note = 2'-O-methyladenosine-3'-phosphate
  modified_base 7: mod_base = OTHER; note = 2'-deoxy-2'-fluoroadenosine-3'-phosphate
  modified_base 8: mod_base = OTHER; note = 2'-O-methylcytidine-3'-phosphate
  modified_base 9: mod_base = OTHER; note = 2'-deoxy-2'-fluoroguanosine-3'-phosphate
  modified_base 10: mod_base = OTHER; note = 2'-deoxy-2'-fluoroguanosine-3'-phosphate
  modified_base 11: mod_base = OTHER; note = 2'-deoxy-2'-fluorocytidine-3'-phosphate
  modified_base 12: mod_base = OTHER; note = 2'-O-methylcytidine-3'-phosphate
  modified_base 13: mod_base = OTHER; note = 2'-deoxy-2'-fluorouridine-3'-phosphate
  modified_base 14: mod_base = OTHER; note = 2'-O-methylguanosine-3'-phosphate
  modified_base 15: mod_base = OTHER; note = 2'-deoxy-2'-fluoroguanosine-3'-phosphate
  modified_base 16: mod_base = OTHER; note = 2'-O-methyladenosine-3'-phosphate
  modified_base 17: mod_base = OTHER; note = 2'-deoxy-2'-fluorouridine-3'-phosphate
  modified_base 18: mod_base = OTHER; note = 2'-O-methylguanosine-3'-phosphate
  modified_base 19: mod_base = OTHER; note = 2'-deoxy-2'-fluoroadenosine-3'-phosphate
  modified_base 20: mod_base = OTHER; note = 2'-O-methylguanosine-3'-phosphate
  modified_base 21: mod_base = OTHER; note = 2'-deoxy-2'-fluoroadenosine-3'-phosphate ((2S,4R)-1-[29-[[2-(acetylamino)-2-deoxy-beta-D-galactopyra nosyl]oxy]-14,14-bis[[3-[[3-[[5-[[2-(acetylamino)-2-deoxy-b eta-D-galactopyranosyl]oxy]-1-oxopentyl]amino]propyl]amino] -3-oxopropoxy]methyl]-1,12,19,25-tetraoxo-16-oxa-13,20,24-t riazanonacos-1-yl]-4-hydroxy-2-pyrrolidinyl)methyl ester
gccccaacggcctggatgaga

SEQ ID NO: 36 - RNA, 21 nt, synthetic construct
  source 1..21: mol_type = other RNA
  modified_base 1: mod_base = OTHER; note = 2'-deoxy-2'-fluoroguanosine-3'-phosphorothioate
  modified_base 2: mod_base = OTHER; note = 2'-O-methylcytidine-3'-phosphorothioate
  modified_base 3: mod_base = OTHER; note = 2'-deoxy-2'-fluorocytidine-3'-phosphate
  modified_base 4: mod_base = OTHER; note = 2'-O-methyladenosine-3'-phosphate
  modified_base 5: mod_base = OTHER; note = 2'-deoxy-2'-fluoroadenosine-3'-phosphate
  modified_base 6: mod_base = OTHER; note = 2'-O-methylguanosine-3'-phosphate
  modified_base 7: mod_base = OTHER; note = 2'-deoxy-2'-fluorocytidine-3'-phosphate
  modified_base 8: mod_base = OTHER; note = 2'-O-methyladenosine-3'-phosphate
  modified_base 9: mod_base = OTHER; note = 2'-deoxy-2'-fluoroguanosine-3'-phosphate
  modified_base 10: mod_base = OTHER; note = 2'-deoxy-2'-fluoroguanosine-3'-phosphate
  modified_base 11: mod_base = OTHER; note = 2'-deoxy-2'-fluoroguanosine-3'-phosphate
  modified_base 12: mod_base = OTHER; note = 2'-O-methylguanosine-3'-phosphate
  modified_base 13: mod_base = OTHER; note = 2'-deoxy-2'-fluoroguanosine-3'-phosphate
  modified_base 14: mod_base = OTHER; note = 2'-O-methyladenosine-3'-phosphate
  modified_base 15: mod_base = OTHER; note = 2'-deoxy-2'-fluorocytidine-3'-phosphate
  modified_base 16: mod_base = OTHER; note = 2'-O-methyladenosine-3'-phosphate
  modified_base 17: mod_base = OTHER; note = 2'-deoxy-2'-fluoroadenosine-3'-phosphate
  modified_base 18: mod_base = OTHER; note = 2'-O-methylguanosine-3'-phosphate
  modified_base 19: mod_base = OTHER; note = 2'-deoxy-2'-fluorouridine-3'-phosphate
  modified_base 20: mod_base = OTHER; note = 2'-O-methyladenosine-3'-phosphate
  modified_base 21: mod_base = OTHER; note = 2'-deoxy-2'-fluorouridine-3'-phosphate ((2S,4R)-1-[29-[[2-(acetylamino)-2-deoxy-beta-D-galactopyra nosyl]oxy]-14,14-bis[[3-[[3-[[5-[[2-(acetylamino)-2-deoxy-b eta-D-galactopyranosyl]oxy]-1-oxopentyl]amino]propyl]amino] -3-oxopropoxy]methyl]-1,12,19,25-tetraoxo-16-oxa-13,20,24-t riazanonacos-1-yl]-4-hydroxy-2-pyrrolidinyl)methyl ester
gccaagcagggggacaagtat

SEQ ID NO: 37 - RNA, 21 nt, synthetic construct
  source 1..21: mol_type = other RNA
  modified_base 1: mod_base = OTHER; note = 2'-deoxy-2'-fluorouridine-3'-phosphorothioate
  modified_base 2: mod_base = OTHER; note = 2'-O-methylcytidine-3'-phosphorothioate
  modified_base 3: mod_base = OTHER; note = 2'-deoxy-2'-fluorocytidine-3'-phosphate
  modified_base 4: mod_base = OTHER; note = 2'-O-methylcytidine-3'-phosphate
  modified_base 5: mod_base = OTHER; note = 2'-deoxy-2'-fluorocytidine-3'-phosphate
  modified_base 6: mod_base = OTHER; note = 2'-O-methyluridine-3'-phosphate
  modified_base 7: mod_base = OTHER; note = 2'-deoxy-2'-fluoroadenosine-3'-phosphate
  modified_base 8: mod_base = OTHER; note = 2'-O-methylcytidine-3'-phosphate
  modified_base 9: mod_base = OTHER; note = 2'-deoxy-2'-fluoroadenosine-3'-phosphate
  modified_base 10: mod_base = OTHER; note = 2'-deoxy-2'-fluoroguanosine-3'-phosphate
  modified_base 11: mod_base = OTHER; note = 2'-deoxy-2'-fluoroguanosine-3'-phosphate
  modified_base 12: mod_base = OTHER; note = 2'-O-methylguanosine-3'-phosphate
  modified_base 13: mod_base = OTHER; note = 2'-deoxy-2'-fluorocytidine-3'-phosphate
  modified_base 14: mod_base = OTHER; note = 2'-O-methylcytidine-3'-phosphate
  modified_base 15: mod_base = OTHER; note = 2'-deoxy-2'-fluoroguanosine-3'-phosphate
  modified_base 16: mod_base = OTHER; note = 2'-O-methyladenosine-3'-phosphate
  modified_base 17: mod_base = OTHER; note = 2'-deoxy-2'-fluoroguanosine-3'-phosphate
  modified_base 18: mod_base = OTHER; note = 2'-O-methyluridine-3'-phosphate
  modified_base 19: mod_base = OTHER; note = 2'-deoxy-2'-fluoroadenosine-3'-phosphate
  modified_base 20: mod_base = OTHER; note = 2'-O-methylcytidine-3'-phosphate
  modified_base 21: mod_base = OTHER; note = 2'-deoxy-2'-fluoroguanosine-3'-phosphate ((2S,4R)-1-[29-[[2-(acetylamino)-2-deoxy-beta-D-galactopyra nosyl]oxy]-14,14-bis[[3-[[3-[[5-[[2-(acetylamino)-2-deoxy-b eta-D-galactopyranosyl]oxy]-1-oxopentyl]amino]propyl]amino] -3-oxopropoxy]methyl]-1,12,19,25-tetraoxo-16-oxa-13,20,24-t riazanonacos-1-yl]-4-hydroxy-2-pyrrolidinyl)methyl ester
tcccctacagggccgagtacg

SEQ ID NO: 38 - RNA, 21 nt, synthetic construct
  source 1..21: mol_type = other RNA
  modified_base 1: mod_base = OTHER; note = 2'-deoxy-2'-fluorocytidine-3'-phosphorothioate
  modified_base 2: mod_base = OTHER; note = 2'-O-methyluridine-3'-phosphorothioate
  modified_base 3: mod_base = OTHER; note = 2'-deoxy-2'-fluoroguanosine-3'-phosphate
  modified_base 4: mod_base = OTHER; note = 2'-O-methylguanosine-3'-phosphate
  modified_base 5: mod_base = OTHER; note = 2'-deoxy-2'-fluoroguanosine-3'-phosphate
  modified_base 6: mod_base = OTHER; note = 2'-O-methyluridine-3'-phosphate
  modified_base 7: mod_base = OTHER; note = 2'-deoxy-2'-fluorouridine-3'-phosphate
  modified_base 8: mod_base = OTHER; note = 2'-O-methylguanosine-3'-phosphate
  modified_base 9: mod_base = OTHER; note = 2'-deoxy-2'-fluorouridine-3'-phosphate
  modified_base 10: mod_base = OTHER; note = 2'-deoxy-2'-fluorouridine-3'-phosphate
  modified_base 11: mod_base = OTHER; note = 2'-deoxy-2'-fluoroadenosine-3'-phosphate
  modified_base 12: mod_base = OTHER; note = 2'-O-methylcytidine-3'-phosphate
  modified_base 13: mod_base = OTHER; note = 2'-deoxy-2'-fluorocytidine-3'-phosphate
  modified_base 14: mod_base = OTHER; note = 2'-O-methylguanosine-3'-phosphate
  modified_base 15: mod_base = OTHER; note = 2'-deoxy-2'-fluorocytidine-3'-phosphate
  modified_base 16: mod_base = OTHER; note = 2'-O-methyluridine-3'-phosphate
  modified_base 17: mod_base = OTHER; note = 2'-deoxy-2'-fluoroadenosine-3'-phosphate
  modified_base 18: mod_base = OTHER; note = 2'-O-methylcytidine-3'-phosphate
  modified_base 19: mod_base = OTHER; note = 2'-deoxy-2'-fluoroadenosine-3'-phosphate
  modified_base 20: mod_base = OTHER; note = 2'-O-methylguanosine-3'-phosphate
  modified_base 21: mod_base = OTHER; note = 2'-deoxy-2'-fluorocytidine-3'-phosphate ((2S,4R)-1-[29-[[2-(acetylamino)-2-deoxy-beta-D-galactopyra nosyl]oxy]-14,14-bis[[3-[[3-[[5-[[2-(acetylamino)-2-deoxy-b eta-D-galactopyranosyl]oxy]-1-oxopentyl]amino]propyl]amino] -3-oxopropoxy]methyl]-1,12,19,25-tetraoxo-16-oxa-13,20,24-t riazanonacos-1-yl]-4-hydroxy-2-pyrrolidinyl)methyl ester
ctgggttgttaccgctacagc

SEQ ID NO: 39 - RNA, 21 nt, synthetic construct
  source 1..21: mol_type = other RNA
  modified_base 1: mod_base = OTHER; note = 2'-deoxy-2'-fluorocytidine-3'-phosphorothioate
  modified_base 2: mod_base = OTHER; note = 2'-O-methyluridine-3'-phosphorothioate
  modified_base 3: mod_base = OTHER; note = 2'-deoxy-2'-fluoroguanosine-3'-phosphate
  modified_base 4: mod_base = OTHER; note = 2'-O-methylguanosine-3'-phosphate
  modified_base 5: mod_base = OTHER; note = 2'-deoxy-2'-fluorocytidine-3'-phosphate
  modified_base 6: mod_base = OTHER; note = 2'-O-methylcytidine-3'-phosphate
  modified_base 7: mod_base = OTHER; note = 2'-deoxy-2'-fluorouridine-3'-phosphate
  modified_base 8: mod_base = OTHER; note = 2'-O-methylguanosine-3'-phosphate
  modified_base 9: mod_base = OTHER; note = 2'-deoxy-2'-fluoroguanosine-3'-phosphate
  modified_base 10: mod_base = OTHER; note = 2'-deoxy-2'-fluoroadenosine-3'-phosphate
  modified_base 11: mod_base = OTHER; note = 2'-deoxy-2'-fluoroguanosine-3'-phosphate
  modified_base 12: mod_base = OTHER; note = 2'-O-methyladenosine-3'-phosphate
  modified_base 13: mod_base = OTHER; note = 2'-deoxy-2'-fluoroguanosine-3'-phosphate
  modified_base 14: mod_base = OTHER; note = 2'-O-methylguanosine-3'-phosphate
  modified_base 15: mod_base = OTHER; note = 2'-deoxy-2'-fluorouridine-3'-phosphate
  modified_base 16: mod_base = OTHER; note = 2'-O-methylguanosine-3'-phosphate
  modified_base 17: mod_base = OTHER; note = 2'-deoxy-2'-fluorouridine-3'-phosphate
  modified_base 18: mod_base = OTHER; note = 2'-O-methylcytidine-3'-phosphate
  modified_base 19: mod_base = OTHER; note = 2'-deoxy-2'-fluorocytidine-3'-phosphate
  modified_base 20: mod_base = OTHER; note = 2'-O-methyluridine-3'-phosphate
  modified_base 21: mod_base = OTHER; note = 2'-deoxy-2'-fluorouridine-3'-phosphate ((2S,4R)-1-[29-[[2-(acetylamino)-2-deoxy-beta-D-galactopyra nosyl]oxy]-14,14-bis[[3-[[3-[[5-[[2-(acetylamino)-2-deoxy-b eta-D-galactopyranosyl]oxy]-1-oxopentyl]amino]propyl]amino] -3-oxopropoxy]methyl]-1,12,19,25-tetraoxo-16-oxa-13,20,24-t riazanonacos-1-yl]-4-hydroxy-2-pyrrolidinyl)methyl ester
ctggcctggagaggtgtcctt

SEQ ID NO: 40 - RNA, 21 nt, synthetic construct
  source 1..21: mol_type = other RNA
  modified_base 1: mod_base = OTHER; note = 2'-deoxy-2'-fluoroguanosine-3'-phosphorothioate
  modified_base 2: mod_base = OTHER; note = 2'-O-methyluridine-3'-phosphorothioate
  modified_base 3: mod_base = OTHER; note = 2'-deoxy-2'-fluoroguanosine-3'-phosphate
  modified_base 4: mod_base = OTHER; note = 2'-O-methylcytidine-3'-phosphate
  modified_base 5: mod_base = OTHER; note = 2'-deoxy-2'-fluoroguanosine-3'-phosphate
  modified_base 6: mod_base = OTHER; note = 2'-O-methylguanosine-3'-phosphate
  modified_base 7: mod_base = OTHER; note = 2'-deoxy-2'-fluoroguanosine-3'-phosphate
  modified_base 8: mod_base = OTHER; note = 2'-O-methyluridine-3'-phosphate
  modified_base 9: mod_base = OTHER; note = 2'-deoxy-2'-fluoroguanosine-3'-phosphate
  modified_base 10: mod_base = OTHER; note = 2'-deoxy-2'-fluorocytidine-3'-phosphate
  modified_base 11: mod_base = OTHER; note = 2'-deoxy-2'-fluoroadenosine-3'-phosphate
  modified_base 12: mod_base = OTHER; note = 2'-O-methylcytidine-3'-phosphate
  modified_base 13: mod_base = OTHER; note = 2'-deoxy-2'-fluorouridine-3'-phosphate
  modified_base 14: mod_base = OTHER; note = 2'-O-methyladenosine-3'-phosphate
  modified_base 15: mod_base = OTHER; note = 2'-deoxy-2'-fluorouridine-3'-phosphate
  modified_base 16: mod_base = OTHER; note = 2'-O-methylguanosine-3'-phosphate
  modified_base 17: mod_base = OTHER; note = 2'-deoxy-2'-fluoroguanosine-3'-phosphate
  modified_base 18: mod_base = OTHER; note = 2'-O-methylcytidine-3'-phosphate
  modified_base 19: mod_base = OTHER; note = 2'-deoxy-2'-fluorouridine-3'-phosphate
  modified_base 20: mod_base = OTHER; note = 2'-O-methyluridine-3'-phosphate
  modified_base 21: mod_base = OTHER; note = 2'-deoxy-2'-fluoroguanosine-3'-phosphate ((2S,4R)-1-[29-[[2-(acetylamino)-2-deoxy-beta-D-galactopyra nosyl]oxy]-14,14-bis[[3-[[3-[[5-[[2-(acetylamino)-2-deoxy-b eta-D-galactopyranosyl]oxy]-1-oxopentyl]amino]propyl]amino] -3-oxopropoxy]methyl]-1,12,19,25-tetraoxo-16-oxa-13,20,24-t riazanonacos-1-yl]-4-hydroxy-2-pyrrolidinyl)methyl ester
gtgcgggtgcactatggcttg

SEQ ID NO: 41 - RNA, 21 nt, synthetic construct
  source 1..21: mol_type = other RNA
  modified_base 1: mod_base = OTHER; note = 2'-deoxy-2'-fluorouridine-3'-phosphorothioate
  modified_base 2: mod_base = OTHER; note = 2'-O-methylguanosine-3'-phosphorothioate
  modified_base 3: mod_base = OTHER; note = 2'-deoxy-2'-fluoroguanosine-3'-phosphate
  modified_base 4: mod_base = OTHER; note = 2'-O-methylcytidine-3'-phosphate
  modified_base 5: mod_base = OTHER; note = 2'-deoxy-2'-fluoroadenosine-3'-phosphate
  modified_base 6: mod_base = OTHER; note = 2'-O-methylguanosine-3'-phosphate
  modified_base 7: mod_base = OTHER; note = 2'-deoxy-2'-fluoroguanosine-3'-phosphate
  modified_base 8: mod_base = OTHER; note = 2'-O-methyladenosine-3'-phosphate
  modified_base 9: mod_base = OTHER; note = 2'-deoxy-2'-fluoroguanosine-3'-phosphate
  modified_base 10: mod_base = OTHER; note = 2'-deoxy-2'-fluoroguanosine-3'-phosphate
  modified_base 11: mod_base = OTHER; note = 2'-deoxy-2'-fluorouridine-3'-phosphate
  modified_base 12: mod_base = OTHER; note = 2'-O-methylguanosine-3'-phosphate
  modified_base 13: mod_base = OTHER; note = 2'-deoxy-2'-fluoroguanosine-3'-phosphate
  modified_base 14: mod_base = OTHER; note = 2'-O-methylcytidine-3'-phosphate
  modified_base 15: mod_base = OTHER; note = 2'-deoxy-2'-fluoroadenosine-3'-phosphate
  modified_base 16: mod_base = OTHER; note = 2'-O-methyluridine-3'-phosphate
  modified_base 17: mod_base = OTHER; note = 2'-deoxy-2'-fluorocytidine-3'-phosphate
  modified_base 18: mod_base = OTHER; note = 2'-O-methyluridine-3'-phosphate
  modified_base 19: mod_base = OTHER; note = 2'-deoxy-2'-fluorouridine-3'-phosphate
  modified_base 20: mod_base = OTHER; note = 2'-O-methylguanosine-3'-phosphate
  modified_base 21: mod_base = OTHER; note = 2'-deoxy-2'-fluorouridine-3'-phosphate ((2S,4R)-1-[29-[[2-(acetylamino)-2-deoxy-beta-D-galactopyra nosyl]oxy]-14,14-bis[[3-[[3-[[5-[[2-(acetylamino)-2-deoxy-b eta-D-galactopyranosyl]oxy]-1-oxopentyl]amino]propyl]amino] -3-oxopropoxy]methyl]-1,12,19,25-tetraoxo-16-oxa-13,20,24-t riazanonacos-1-yl]-4-hydroxy-2-pyrrolidinyl)methyl ester
tggcaggaggtggcatcttgt

SEQ ID NO: 42 - RNA, 21 nt, synthetic construct
  source 1..21: mol_type = other RNA
  modified_base 1: mod_base = OTHER; note = 2'-deoxy-2'-fluorocytidine-3'-phosphorothioate
  modified_base 2: mod_base = OTHER; note = 2'-O-methylcytidine-3'-phosphorothioate
  modified_base 3: mod_base = OTHER; note = 2'-deoxy-2'-fluorocytidine-3'-phosphate
  modified_base 4: mod_base = OTHER; note = 2'-O-methyluridine-3'-phosphate
  modified_base 5: mod_base = OTHER; note = 2'-deoxy-2'-fluoroadenosine-3'-phosphate
  modified_base 6: mod_base = OTHER; note = 2'-O-methylcytidine-3'-phosphate
  modified_base 7: mod_base = OTHER; note = 2'-deoxy-2'-fluoroadenosine-3'-phosphate
  modified_base 8: mod_base = OTHER; note = 2'-O-methylguanosine-3'-phosphate
  modified_base 9: mod_base = OTHER; note = 2'-deoxy-2'-fluoroguanosine-3'-phosphate
  modified_base 10: mod_base = OTHER; note = 2'-deoxy-2'-fluoroguanosine-3'-phosphate
  modified_base 11: mod_base = OTHER; note = 2'-deoxy-2'-fluorocytidine-3'-phosphate
  modified_base 12: mod_base = OTHER; note = 2'-O-methylcytidine-3'-phosphate
  modified_base 13: mod_base = OTHER; note = 2'-deoxy-2'-fluoroguanosine-3'-phosphate
  modified_base 14: mod_base = OTHER; note = 2'-O-methyladenosine-3'-phosphate
  modified_base 15: mod_base = OTHER; note = 2'-deoxy-2'-fluoroguanosine-3'-phosphate
  modified_base 16: mod_base = OTHER; note = 2'-O-methyluridine-3'-phosphate
  modified_base 17: mod_base = OTHER; note = 2'-deoxy-2'-fluoroadenosine-3'-phosphate
  modified_base 18: mod_base = OTHER; note = 2'-O-methylcytidine-3'-phosphate
  modified_base 19: mod_base = OTHER; note = 2'-deoxy-2'-fluoroguanosine-3'-phosphate
  modified_base 20: mod_base = OTHER; note = 2'-O-methyladenosine-3'-phosphate
  modified_base 21: mod_base = OTHER; note = 2'-deoxy-2'-fluoroadenosine-3'-phosphate ((2S,4R)-1-[29-[[2-(acetylamino)-2-deoxy-beta-D-galactopyra nosyl]oxy]-14,14-bis[[3-[[3-[[5-[[2-(acetylamino)-2-deoxy-b eta-D-galactopyranosyl]oxy]-1-oxopentyl]amino]propyl]amino] -3-oxopropoxy]methyl]-1,12,19,25-tetraoxo-16-oxa-13,20,24-t riazanonacos-1-yl]-4-hydroxy-2-pyrrolidinyl)methyl ester
ccctacagggccgagtacgaa

SEQ ID NO: 43 - RNA, 21 nt, synthetic construct
  source 1..21: mol_type = other RNA
  modified_base 1: mod_base = OTHER; note = 2'-deoxy-2'-fluoroadenosine-3'-phosphorothioate
  modified_base 2: mod_base = OTHER; note = 2'-O-methylcytidine-3'-phosphorothioate
  modified_base 3: mod_base = OTHER; note = 2'-deoxy-2'-fluorocytidine-3'-phosphate
  modified_base 4: mod_base = OTHER; note = 2'-O-methyluridine-3'-phosphate
  modified_base 5: mod_base = OTHER; note = 2'-deoxy-2'-fluoroguanosine-3'-phosphate
  modified_base 6: mod_base = OTHER; note = 2'-O-methylcytidine-3'-phosphate
  modified_base 7: mod_base = OTHER; note = 2'-deoxy-2'-fluorouridine-3'-phosphate
  modified_base 8: mod_base = OTHER; note = 2'-O-methyluridine-3'-phosphate
  modified_base 9: mod_base = OTHER; note = 2'-deoxy-2'-fluorocytidine-3'-phosphate
  modified_base 10: mod_base = OTHER; note = 2'-deoxy-2'-fluorouridine-3'-phosphate
  modified_base 11: mod_base = OTHER; note = 2'-deoxy-2'-fluorouridine-3'-phosphate
  modified_base 12: mod_base = OTHER; note = 2'-O-methylcytidine-3'-phosphate
  modified_base 13: mod_base = OTHER; note = 2'-deoxy-2'-fluorouridine-3'-phosphate
  modified_base 14: mod_base = OTHER; note = 2'-O-methylguanosine-3'-phosphate
  modified_base 15: mod_base = OTHER; note = 2'-deoxy-2'-fluoroguanosine-3'-phosphate
  modified_base 16: mod_base = OTHER; note = 2'-O-methyluridine-3'-phosphate
  modified_base 17: mod_base = OTHER; note = 2'-deoxy-2'-fluorouridine-3'-phosphate
  modified_base 18: mod_base = OTHER; note = 2'-O-methylcytidine-3'-phosphate
  modified_base 19: mod_base = OTHER; note = 2'-deoxy-2'-fluoroadenosine-3'-phosphate
  modified_base 20: mod_base = OTHER; note = 2'-O-methyluridine-3'-phosphate
  modified_base 21: mod_base = OTHER; note = 2'-deoxy-2'-fluorouridine-3'-phosphate ((2S,4R)-1-[29-[[2-(acetylamino)-2-deoxy-beta-D-galactopyra nosyl]oxy]-14,14-bis[[3-[[3-[[5-[[2-(acetylamino)-2-deoxy-b eta-D-galactopyranosyl]oxy]-1-oxopentyl]amino]propyl]amino] -3-oxopropoxy]methyl]-1,12,19,25-tetraoxo-16-oxa-13,20,24-t riazanonacos-1-yl]-4-hydroxy-2-pyrrolidinyl)methyl ester
acctgcttcttctggttcatt

SEQ ID NO: 44 - RNA, 21 nt, synthetic construct
  source 1..21: mol_type = other RNA
  modified_base 1: mod_base = OTHER; note = 2'-deoxy-2'-fluorouridine-3'-phosphorothioate
  modified_base 2: mod_base = OTHER; note = 2'-O-methylguanosine-3'-phosphorothioate
  modified_base 3: mod_base = OTHER; note = 2'-deoxy-2'-fluorocytidine-3'-phosphate
  modified_base 4: mod_base = OTHER; note = 2'-O-methylcytidine-3'-phosphate
  modified_base 5: mod_base = OTHER; note = 2'-deoxy-2'-fluorouridine-3'-phosphate
  modified_base 6: mod_base = OTHER; note = 2'-O-methylguanosine-3'-phosphate
  modified_base 7: mod_base = OTHER; note = 2'-deoxy-2'-fluorouridine-3'-phosphate
  modified_base 8: mod_base = OTHER; note = 2'-O-methylguanosine-3'-phosphate
  modified_base 9: mod_base = OTHER; note = 2'-deoxy-2'-fluoroadenosine-3'-phosphate
  modified_base 10: mod_base = OTHER; note = 2'-deoxy-2'-fluorouridine-3'-phosphate
  modified_base 11: mod_base = OTHER; note = 2'-deoxy-2'-fluoroguanosine-3'-phosphate
  modified_base 12: mod_base = OTHER; note = 2'-O-methylguanosine-3'-phosphate
  modified_base 13: mod_base = OTHER; note = 2'-deoxy-2'-fluoroguanosine-3'-phosphate
  modified_base 14: mod_base = OTHER; note = 2'-O-methylguanosine-3'-phosphate
  modified_base 15: mod_base = OTHER; note = 2'-deoxy-2'-fluorouridine-3'-phosphate
  modified_base 16: mod_base = OTHER; note = 2'-O-methylcytidine-3'-phosphate
  modified_base 17: mod_base = OTHER; note = 2'-deoxy-2'-fluoroadenosine-3'-phosphate
  modified_base 18: mod_base = OTHER; note = 2'-O-methyladenosine-3'-phosphate
  modified_base 19: mod_base = OTHER; note = 2'-deoxy-2'-fluoroguanosine-3'-phosphate
  modified_base 20: mod_base = OTHER; note = 2'-O-methylguanosine-3'-phosphate
  modified_base 21: mod_base = OTHER; note = 2'-deoxy-2'-fluoroadenosine-3'-phosphate ((2S,4R)-1-[29-[[2-(acetylamino)-2-deoxy-beta-D-galactopyra nosyl]oxy]-14,14-bis[[3-[[3-[[5-[[2-(acetylamino)-2-deoxy-b eta-D-galactopyranosyl]oxy]-1-oxopentyl]amino]propyl]amino] -3-oxopropoxy]methyl]-1,12,19,25-tetraoxo-16-oxa-13,20,24-t riazanonacos-1-yl]-4-hydroxy-2-pyrrolidinyl)methyl ester
tgcctgtgatggggtcaagga

SEQ ID NO: 45 - RNA, 21 nt, synthetic construct
  source 1..21: mol_type = other RNA
  modified_base 1: mod_base = OTHER; note = 2'-deoxy-2'-fluorocytidine-3'-phosphorothioate
  modified_base 2: mod_base = OTHER; note = 2'-O-methyladenosine-3'-phosphorothioate
  modified_base 3: mod_base = OTHER; note = 2'-deoxy-2'-fluoroguanosine-3'-phosphate
  modified_base 4: mod_base = OTHER; note = 2'-O-methylcytidine-3'-phosphate
  modified_base 5: mod_base = OTHER; note = 2'-deoxy-2'-fluorouridine-3'-phosphate
  modified_base 6: mod_base = OTHER; note = 2'-O-methyluridine-3'-phosphate
  modified_base 7: mod_base = OTHER; note = 2'-deoxy-2'-fluorocytidine-3'-phosphate
  modified_base 8: mod_base = OTHER; note = 2'-O-methylguanosine-3'-phosphate
  modified_base 9: mod_base = OTHER; note = 2'-deoxy-2'-fluoroguanosine-3'-phosphate
  modified_base 10: mod_base = OTHER; note = 2'-deoxy-2'-fluoroadenosine-3'-phosphate
  modified_base 11: mod_base = OTHER; note = 2'-deoxy-2'-fluoroadenosine-3'-phosphate
  modified_base 12: mod_base = OTHER; note = 2'-O-methylguanosine-3'-phosphate
  modified_base 13: mod_base = OTHER; note = 2'-deoxy-2'-fluorocytidine-3'-phosphate
  modified_base 14: mod_base = OTHER; note = 2'-O-methylcytidine-3'-phosphate
  modified_base 15: mod_base = OTHER; note = 2'-deoxy-2'-fluorocytidine-3'-phosphate
  modified_base 16: mod_base = OTHER; note = 2'-O-methylcytidine-3'-phosphate
  modified_base 17: mod_base = OTHER; note = 2'-deoxy-2'-fluorouridine-3'-phosphate
  modified_base 18: mod_base = OTHER; note = 2'-O-methylguanosine-3'-phosphate
  modified_base 19: mod_base = OTHER; note = 2'-deoxy-2'-fluoroguanosine-3'-phosphate
  modified_base 20: mod_base = OTHER; note = 2'-O-methyluridine-3'-phosphate
  modified_base 21: mod_base = OTHER; note = 2'-deoxy-2'-fluorocytidine-3'-phosphate ((2S,4R)-1-[29-[[2-(acetylamino)-2-deoxy-beta-D-galactopyra nosyl]oxy]-14,14-bis[[3-[[3-[[5-[[2-(acetylamino)-2-deoxy-b eta-D-galactopyranosyl]oxy]-1-oxopentyl]amino]propyl]amino] -3-oxopropoxy]methyl]-1,12,19,25-tetraoxo-16-oxa-13,20,24-t riazanonacos-1-yl]-4-hydroxy-2-pyrrolidinyl)methyl ester
cagcttcggaagcccctggtc

SEQ ID NO: 46 - RNA, 21 nt, synthetic construct
  source 1..21: mol_type = other RNA
  modified_base 1: mod_base = OTHER; note = 2'-deoxy-2'-fluorocytidine-3'-phosphorothioate
  modified_base 2: mod_base = OTHER; note = 2'-O-methylcytidine-3'-phosphorothioate
  modified_base 3: mod_base = OTHER; note = 2'-deoxy-2'-fluorocytidine-3'-phosphate
  modified_base 4: mod_base = OTHER; note = 2'-O-methylcytidine-3'-phosphate
  modified_base 5: mod_base = OTHER; note = 2'-deoxy-2'-fluorouridine-3'-phosphate
  modified_base 6: mod_base = OTHER; note = 2'-O-methylguanosine-3'-phosphate
  modified_base 7: mod_base = OTHER; note = 2'-deoxy-2'-fluoroguanosine-3'-phosphate
  modified_base 8: mod_base = OTHER; note = 2'-O-methyluridine-3'-phosphate
  modified_base 9: mod_base = OTHER; note = 2'-deoxy-2'-fluorocytidine-3'-phosphate
  modified_base 10: mod_base = OTHER; note = 2'-deoxy-2'-fluorouridine-3'-phosphate
  modified_base 11: mod_base = OTHER; note = 2'-deoxy-2'-fluoroadenosine-3'-phosphate
  modified_base 12: mod_base = OTHER; note = 2'-O-methyladenosine-3'-phosphate
  modified_base 13: mod_base = OTHER; note = 2'-deoxy-2'-fluorocytidine-3'-phosphate
  modified_base 14: mod_base = OTHER; note = 2'-O-methyluridine-3'-phosphate
  modified_base 15: mod_base = OTHER; note = 2'-deoxy-2'-fluorouridine-3'-phosphate
  modified_base 16: mod_base = OTHER; note = 2'-O-methylguanosine-3'-phosphate
  modified_base 17: mod_base = OTHER; note = 2'-deoxy-2'-fluoroguanosine-3'-phosphate
  modified_base 18: mod_base = OTHER; note = 2'-O-methylguanosine-3'-phosphate
  modified_base 19: mod_base = OTHER; note = 2'-deoxy-2'-fluoroadenosine-3'-phosphate
  modified_base 20: mod_base = OTHER; note = 2'-O-methyluridine-3'-phosphate
  modified_base 21: mod_base = OTHER; note = 2'-deoxy-2'-fluorocytidine-3'-phosphate ((2S,4R)-1-[29-[[2-(acetylamino)-2-deoxy-beta-D-galactopyra nosyl]oxy]-14,14-bis[[3-[[3-[[5-[[2-(acetylamino)-2-deoxy-b eta-D-galactopyranosyl]oxy]-1-oxopentyl]amino]propyl]amino] -3-oxopropoxy]methyl]-1,12,19,25-tetraoxo-16-oxa-13,20,24-t riazanonacos-1-yl]-4-hydroxy-2-pyrrolidinyl)methyl ester
cccctggtctaacttgggatc

SEQ ID NO: 47 - RNA, 21 nt, synthetic construct
  source 1..21: mol_type = other RNA
  modified_base 1: mod_base = OTHER; note = 2'-deoxy-2'-fluorouridine-3'-phosphorothioate
  modified_base 2: mod_base = OTHER; note = 2'-O-methylguanosine-3'-phosphorothioate
  modified_base 3: mod_base = OTHER; note = 2'-deoxy-2'-fluorocytidine-3'-phosphate
  modified_base 4: mod_base = OTHER; note = 2'-O-methyluridine-3'-phosphate
  modified_base 5: mod_base = OTHER; note = 2'-deoxy-2'-fluorouridine-3'-phosphate
  modified_base 6: mod_base = OTHER; note = 2'-O-methylcytidine-3'-phosphate
  modified_base 7: mod_base = OTHER; note = 2'-deoxy-2'-fluorouridine-3'-phosphate
  modified_base 8: mod_base = OTHER; note = 2'-O-methyluridine-3'-phosphate
  modified_base 9: mod_base = OTHER; note = 2'-deoxy-2'-fluorocytidine-3'-phosphate
  modified_base 10: mod_base = OTHER; note = 2'-deoxy-2'-fluorouridine-3'-phosphate
  modified_base 11: mod_base = OTHER; note = 2'-deoxy-2'-fluoroguanosine-3'-phosphate
  modified_base 12: mod_base = OTHER; note = 2'-O-methylguanosine-3'-phosphate
  modified_base 13: mod_base = OTHER; note = 2'-deoxy-2'-fluorouridine-3'-phosphate
  modified_base 14: mod_base = OTHER; note = 2'-O-methyluridine-3'-phosphate
  modified_base 15: mod_base = OTHER; note = 2'-deoxy-2'-fluorocytidine-3'-phosphate
  modified_base 16: mod_base = OTHER; note = 2'-O-methyladenosine-3'-phosphate
  modified_base 17: mod_base = OTHER; note = 2'-deoxy-2'-fluorouridine-3'-phosphate
  modified_base 18: mod_base = OTHER; note = 2'-O-methyluridine-3'-phosphate
  modified_base 19: mod_base = OTHER; note = 2'-deoxy-2'-fluorocytidine-3'-phosphate
  modified_base 20: mod_base = OTHER; note = 2'-O-methyluridine-3'-phosphate
  modified_base 21: mod_base = OTHER; note = 2'-deoxy-2'-fluorocytidine-3'-phosphate ((2S,4R)-1-[29-[[2-(acetylamino)-2-deoxy-beta-D-galactopyra nosyl]oxy]-14,14-bis[[3-[[3-[[5-[[2-(acetylamino)-2-deoxy-b eta-D-galactopyranosyl]oxy]-1-oxopentyl]amino]propyl]amino] -3-oxopropoxy]methyl]-1,12,19,25-tetraoxo-16-oxa-13,20,24-t riazanonacos-1-yl]-4-hydroxy-2-pyrrolidinyl)methyl ester
tgcttcttctggttcattctc

SEQ ID NO: 48 - RNA, 21 nt, synthetic construct
  source 1..21: mol_type = other RNA
  modified_base 1: mod_base = OTHER; note = 2'-deoxy-2'-fluorocytidine-3'-phosphorothioate
  modified_base 2: mod_base = OTHER; note = 2'-O-methylcytidine-3'-phosphorothioate
  modified_base 3: mod_base = OTHER; note = 2'-deoxy-2'-fluorocytidine-3'-phosphate
  modified_base 4: mod_base = OTHER; note = 2'-O-methyladenosine-3'-phosphate
  modified_base 5: mod_base = OTHER; note = 2'-deoxy-2'-fluoroadenosine-3'-phosphate
  modified_base 6: mod_base = OTHER; note = 2'-O-methylcytidine-3'-phosphate
  modified_base 7: mod_base = OTHER; note = 2'-deoxy-2'-fluoroguanosine-3'-phosphate
  modified_base 8: mod_base = OTHER; note = 2'-O-methylguanosine-3'-phosphate
  modified_base 9: mod_base = OTHER; note = 2'-deoxy-2'-fluorocytidine-3'-phosphate
  modified_base 10: mod_base = OTHER; note = 2'-deoxy-2'-fluorocytidine-3'-phosphate
  modified_base 11: mod_base = OTHER; note = 2'-deoxy-2'-fluorouridine-3'-phosphate
  modified_base 12: mod_base = OTHER; note = 2'-O-methylguanosine-3'-phosphate
  modified_base 13: mod_base = OTHER; note = 2'-deoxy-2'-fluoroguanosine-3'-phosphate
  modified_base 14: mod_base = OTHER; note = 2'-O-methyladenosine-3'-phosphate
  modified_base 15: mod_base = OTHER; note = 2'-deoxy-2'-fluorouridine-3'-phosphate
  modified_base 16: mod_base = OTHER; note = 2'-O-methylguanosine-3'-phosphate
  modified_base 17: mod_base = OTHER; note = 2'-deoxy-2'-fluoroadenosine-3'-phosphate
  modified_base 18: mod_base = OTHER; note = 2'-O-methylguanosine-3'-phosphate
  modified_base 19: mod_base = OTHER; note = 2'-deoxy-2'-fluoroadenosine-3'-phosphate
  modified_base 20: mod_base = OTHER; note = 2'-O-methylguanosine-3'-phosphate
  modified_base 21: mod_base = OTHER; note = 2'-deoxy-2'-fluoroadenosine-3'-phosphate ((2S,4R)-1-[29-[[2-(acetylamino)-2-deoxy-beta-D-galactopyra nosyl]oxy]-14,14-bis[[3-[[3-[[5-[[2-(acetylamino)-2-deoxy-b eta-D-galactopyranosyl]oxy]-1-oxopentyl]amino]propyl]amino] -3-oxopropoxy]methyl]-1,12,19,25-tetraoxo-16-oxa-13,20,24-t riazanonacos-1-yl]-4-hydroxy-2-pyrrolidinyl)methyl ester
cccaacggcctggatgagaga

SEQ ID NO: 49 - RNA, 21 nt, synthetic construct
  source 1..21: mol_type = other RNA
  modified_base 1: mod_base = OTHER; note = 2'-deoxy-2'-fluoroadenosine-3'-phosphorothioate
  modified_base 2: mod_base = OTHER; note = 2'-O-methyladenosine-3'-phosphorothioate
  modified_base 3: mod_base = OTHER; note = 2'-deoxy-2'-fluoroguanosine-3'-phosphate
  modified_base 4: mod_base = OTHER; note = 2'-O-methylguanosine-3'-phosphate
  modified_base 5: mod_base = OTHER; note = 2'-deoxy-2'-fluoroguanosine-3'-phosphate
  modified_base 6: mod_base = OTHER; note = 2'-O-methylcytidine-3'-phosphate
  modified_base 7: mod_base = OTHER; note = 2'-deoxy-2'-fluorocytidine-3'-phosphate
  modified_base 8: mod_base = OTHER; note = 2'-O-methyluridine-3'-phosphate
  modified_base 9: mod_base = OTHER; note = 2'-deoxy-2'-fluoroguanosine-3'-phosphate
  modified_base 10: mod_base = OTHER; note = 2'-deoxy-2'-fluorocytidine-3'-phosphate
  modified_base 11: mod_base = OTHER; note = 2'-deoxy-2'-fluoroadenosine-3'-phosphate
  modified_base 12: mod_base = OTHER; note = 2'-O-methylcytidine-3'-phosphate
  modified_base 13: mod_base = OTHER; note = 2'-deoxy-2'-fluoroadenosine-3'-phosphate
  modified_base 14: mod_base = OTHER; note = 2'-O-methylguanosine-3'-phosphate
  modified_base 15: mod_base = OTHER; note = 2'-deoxy-2'-fluorocytidine-3'-phosphate
  modified_base 16: mod_base = OTHER; note = 2'-O-methyluridine-3'-phosphate
  modified_base 17: mod_base = OTHER; note = 2'-deoxy-2'-fluoroadenosine-3'-phosphate
  modified_base 18: mod_base = OTHER; note = 2'-O-methylcytidine-3'-phosphate
  modified_base 19: mod_base = OTHER; note = 2'-deoxy-2'-fluorouridine-3'-phosphate
  modified_base 20: mod_base = OTHER; note = 2'-O-methyladenosine-3'-phosphate
  modified_base 21: mod_base = OTHER; note = 2'-deoxy-2'-fluorocytidine-3'-phosphate ((2S,4R)-1-[29-[[2-(acetylamino)-2-deoxy-beta-D-galactopyra nosyl]oxy]-14,14-bis[[3-[[3-[[5-[[2-(acetylamino)-2-deoxy-b eta-D-galactopyranosyl]oxy]-1-oxopentyl]amino]propyl]amino] -3-oxopropoxy]methyl]-1,12,19,25-tetraoxo-16-oxa-13,20,24-t riazanonacos-1-yl]-4-hydroxy-2-pyrrolidinyl)methyl ester
aagggcctgcacagctactac

SEQ ID NO: 50 - RNA, 21 nt, synthetic construct
  source 1..21: mol_type = other RNA
  modified_base 1: mod_base = OTHER; note = 2'-deoxy-2'-fluoroguanosine-3'-phosphorothioate
  modified_base 2: mod_base = OTHER; note = 2'-O-methyluridine-3'-phosphorothioate
  modified_base 3: mod_base = OTHER; note = 2'-deoxy-2'-fluorocytidine-3'-phosphate
  modified_base 4: mod_base = OTHER; note = 2'-O-methyluridine-3'-phosphate
  modified_base 5: mod_base = OTHER; note = 2'-deoxy-2'-fluoroadenosine-3'-phosphate
  modified_base 6: mod_base = OTHER; note = 2'-O-methyladenosine-3'-phosphate
  modified_base 7: mod_base = OTHER; note = 2'-deoxy-2'-fluorocytidine-3'-phosphate
  modified_base 8: mod_base = OTHER; note = 2'-O-methyluridine-3'-phosphate
  modified_base 9: mod_base = OTHER; note = 2'-deoxy-2'-fluorouridine-3'-phosphate
  modified_base 10: mod_base = OTHER; note = 2'-deoxy-2'-fluoroguanosine-3'-phosphate
  modified_base 11: mod_base = OTHER; note = 2'-deoxy-2'-fluoroguanosine-3'-phosphate
  modified_base 12: mod_base = OTHER; note = 2'-O-methylguanosine-3'-phosphate
  modified_base 13: mod_base = OTHER; note = 2'-deoxy-2'-fluoroadenosine-3'-phosphate
  modified_base 14: mod_base = OTHER; note = 2'-O-methyluridine-3'-phosphate
  modified_base 15: mod_base = OTHER; note = 2'-deoxy-2'-fluorocytidine-3'-phosphate
  modified_base 16: mod_base = OTHER; note = 2'-O-methyluridine-3'-phosphate
  modified_base 17: mod_base = OTHER; note = 2'-deoxy-2'-fluoroguanosine-3'-phosphate
  modified_base 18: mod_base = OTHER; note = 2'-O-methylguanosine-3'-phosphate
  modified_base 19: mod_base = OTHER; note = 2'-deoxy-2'-fluoroguanosine-3'-phosphate
  modified_base 20: mod_base = OTHER; note = 2'-O-methyladenosine-3'-phosphate
  modified_base 21: mod_base = OTHER; note = 2'-deoxy-2'-fluoroadenosine-3'-phosphate ((2S,4R)-1-[29-[[2-(acetylamino)-2-deoxy-beta-D-galactopyra nosyl]oxy]-14,14-bis[[3-[[3-[[5-[[2-(acetylamino)-2-deoxy-b eta-D-galactopyranosyl]oxy]-1-oxopentyl]amino]propyl]amino] -3-oxopropoxy]methyl]-1,12,19,25-tetraoxo-16-oxa-13,20,24-t riazanonacos-1-yl]-4-hydroxy-2-pyrrolidinyl)methyl ester
gtctaacttgggatctgggaa

SEQ ID NO: 51 - RNA, 21 nt, synthetic construct
  source 1..21: mol_type = other RNA
  modified_base 1: mod_base = OTHER; note = 2'-deoxy-2'-fluoroadenosine-3'-phosphorothioate
  modified_base 2: mod_base = OTHER; note = 2'-O-methylguanosine-3'-phosphorothioate
  modified_base 3: mod_base = OTHER; note = 2'-deoxy-2'-fluorocytidine-3'-phosphate
  modified_base 4: mod_base = OTHER; note = 2'-O-methyluridine-3'-phosphate
  modified_base 5: mod_base = OTHER; note = 2'-deoxy-2'-fluorouridine-3'-phosphate
  modified_base 6: mod_base = OTHER; note = 2'-O-methylcytidine-3'-phosphate
  modified_base 7: mod_base = OTHER; note = 2'-deoxy-2'-fluoroguanosine-3'-phosphate
  modified_base 8: mod_base = OTHER; note = 2'-O-methylguanosine-3'-phosphate
  modified_base 9: mod_base = OTHER; note = 2'-deoxy-2'-fluoroadenosine-3'-phosphate
  modified_base 10: mod_base = OTHER; note = 2'-deoxy-2'-fluoroadenosine-3'-phosphate
  modified_base 11: mod_base = OTHER; note = 2'-deoxy-2'-fluoroguanosine-3'-phosphate
  modified_base 12: mod_base = OTHER; note = 2'-O-methylcytidine-3'-phosphate
  modified_base 13: mod_base = OTHER; note = 2'-deoxy-2'-fluorocytidine-3'-phosphate
  modified_base 14: mod_base = OTHER; note = 2'-O-methylcytidine-3'-phosphate
  modified_base 15: mod_base = OTHER; note = 2'-deoxy-2'-fluorocytidine-3'-phosphate
  modified_base 16: mod_base = OTHER; note = 2'-O-methyluridine-3'-phosphate
  modified_base 17: mod_base = OTHER; note = 2'-deoxy-2'-fluoroguanosine-3'-phosphate
  modified_base 18: mod_base = OTHER; note = 2'-O-methylguanosine-3'-phosphate
  modified_base 19: mod_base = OTHER; note = 2'-deoxy-2'-fluorouridine-3'-phosphate
  modified_base 20: mod_base = OTHER; note = 2'-O-methylcytidine-3'-phosphate
  modified_base 21: mod_base = OTHER; note = 2'-deoxy-2'-fluorouridine-3'-phosphate ((2S,4R)-1-[29-[[2-(acetylamino)-2-deoxy-beta-D-galactopyra nosyl]oxy]-14,14-bis[[3-[[3-[[5-[[2-(acetylamino)-2-deoxy-b eta-D-galactopyranosyl]oxy]-1-oxopentyl]amino]propyl]amino] -3-oxopropoxy]methyl]-1,12,19,25-tetraoxo-16-oxa-13,20,24-t riazanonacos-1-yl]-4-hydroxy-2-pyrrolidinyl)methyl ester
agcttcggaagcccctggtct

SEQ ID NO: 52 - RNA, 21 nt, synthetic construct
  source 1..21: mol_type = other RNA
  modified_base 1: mod_base = OTHER; note = 2'-deoxy-2'-fluorocytidine-3'-phosphorothioate
  modified_base 2: mod_base = OTHER; note = 2'-O-methylcytidine-3'-phosphorothioate
  modified_base 3: mod_base = OTHER; note = 2'-deoxy-2'-fluoroadenosine-3'-phosphate
  modified_base 4: mod_base = OTHER; note = 2'-O-methylguanosine-3'-phosphate
  modified_base 5: mod_base = OTHER; note = 2'-deoxy-2'-fluorouridine-3'-phosphate
  modified_base 6: mod_base = OTHER; note = 2'-O-methylguanosine-3'-phosphate
  modified_base 7: mod_base = OTHER; note = 2'-deoxy-2'-fluorouridine-3'-phosphate
  modified_base 8: mod_base = OTHER; note = 2'-O-methylguanosine-3'-phosphate
  modified_base 9: mod_base = OTHER; note = 2'-deoxy-2'-fluoroadenosine-3'-phosphate
  modified_base 10: mod_base = OTHER; note = 2'-deoxy-2'-fluoroadenosine-3'-phosphate
  modified_base 11: mod_base = OTHER; note = 2'-deoxy-2'-fluoroadenosine-3'-phosphate
  modified_base 12: mod_base = OTHER; note = 2'-O-methylguanosine-3'-phosphate
  modified_base 13: mod_base = OTHER; note = 2'-deoxy-2'-fluoroadenosine-3'-phosphate
  modified_base 14: mod_base = OTHER; note = 2'-O-methylcytidine-3'-phosphate
  modified_base 15: mod_base = OTHER; note = 2'-deoxy-2'-fluoroadenosine-3'-phosphate
  modified_base 16: mod_base = OTHER; note = 2'-O-methyluridine-3'-phosphate
  modified_base 17: mod_base = OTHER; note = 2'-deoxy-2'-fluoroadenosine-3'-phosphate
  modified_base 18: mod_base = OTHER; note = 2'-O-methylguanosine-3'-phosphate
  modified_base 19: mod_base = OTHER; note = 2'-deoxy-2'-fluorocytidine-3'-phosphate
  modified_base 20: mod_base = OTHER; note = 2'-O-methyluridine-3'-phosphate
  modified_base 21: mod_base = OTHER; note = 2'-deoxy-2'-fluoroguanosine-3'-phosphate ((2S,4R)-1-[29-[[2-(acetylamino)-2-deoxy-beta-D-galactopyra nosyl]oxy]-14,14-bis[[3-[[3-[[5-[[2-(acetylamino)-2-deoxy-b eta-D-galactopyranosyl]oxy]-1-oxopentyl]amino]propyl]amino] -3-oxopropoxy]methyl]-1,12,19,25-tetraoxo-16-oxa-13,20,24-t riazanonacos-1-yl]-4-hydroxy-2-pyrrolidinyl)methyl ester
ccagtgtgaaagacatagctg

SEQ ID NO: 53 - RNA, 21 nt, synthetic construct
  source 1..21: mol_type = other RNA
  modified_base 1: mod_base = OTHER; note = 2'-deoxy-2'-fluorocytidine-3'-phosphorothioate
  modified_base 2: mod_base = OTHER; note = 2'-O-methylcytidine-3'-phosphorothioate
  modified_base 3: mod_base = OTHER; note = 2'-deoxy-2'-fluoroadenosine-3'-phosphate
  modified_base 4: mod_base = OTHER; note = 2'-O-methylguanosine-3'-phosphate
  modified_base 5: mod_base = OTHER; note = 2'-deoxy-2'-fluoroguanosine-3'-phosphate
  modified_base 6: mod_base = OTHER; note = 2'-O-methyluridine-3'-phosphate
  modified_base 7: mod_base = OTHER; note = 2'-deoxy-2'-fluorouridine-3'-phosphate
  modified_base 8: mod_base = OTHER; note = 2'-O-methylcytidine-3'-phosphate
  modified_base 9: mod_base = OTHER; note = 2'-deoxy-2'-fluoroguanosine-3'-phosphate
  modified_base 10: mod_base = OTHER; note = 2'-deoxy-2'-fluoroguanosine-3'-phosphate
  modified_base 11: mod_base = OTHER; note = 2'-deoxy-2'-fluoroguanosine-3'-phosphate
  modified_base 12: mod_base = OTHER; note = 2'-O-methylguanosine-3'-phosphate
  modified_base 13: mod_base = OTHER; note = 2'-deoxy-2'-fluorouridine-3'-phosphate
  modified_base 14: mod_base = OTHER; note = 2'-O-methylcytidine-3'-phosphate
  modified_base 15: mod_base = OTHER; note = 2'-deoxy-2'-fluoroguanosine-3'-phosphate
  modified_base 16: mod_base = OTHER; note = 2'-O-methyladenosine-3'-phosphate
  modified_base 17: mod_base = OTHER; note = 2'-deoxy-2'-fluorocytidine-3'-phosphate
  modified_base 18: mod_base = OTHER; note = 2'-O-methyladenosine-3'-phosphate
  modified_base 19: mod_base = OTHER; note = 2'-deoxy-2'-fluorocytidine-3'-phosphate
  modified_base 20: mod_base = OTHER; note = 2'-O-methyladenosine-3'-phosphate
  modified_base 21: mod_base = OTHER; note = 2'-deoxy-2'-fluorouridine-3'-phosphate ((2S,4R)-1-[29-[[2-(acetylamino)-2-deoxy-beta-D-galactopyra nosyl]oxy]-14,14-bis[[3-[[3-[[5-[[2-(acetylamino)-2-deoxy-b eta-D-galactopyranosyl]oxy]-1-oxopentyl]amino]propyl]amino] -3-oxopropoxy]methyl]-1,12,19,25-tetraoxo-16-oxa-13,20,24-t riazanonacos-1-yl]-4-hydroxy-2-pyrrolidinyl)methyl ester
ccaggttcggggtcgacacat

SEQ ID NO: 54 - RNA, 21 nt, synthetic construct
  source 1..21: mol_type = other RNA
  modified_base 1: mod_base = OTHER; note = 2'-deoxy-2'-fluorouridine-3'-phosphorothioate
  modified_base 2: mod_base = OTHER; note = 2'-O-methylcytidine-3'-phosphorothioate
  modified_base 3: mod_base = OTHER; note = 2'-deoxy-2'-fluorocytidine-3'-phosphate
  modified_base 4: mod_base = OTHER; note = 2'-O-methyladenosine-3'-phosphate
  modified_base 5: mod_base = OTHER; note = 2'-deoxy-2'-fluorocytidine-3'-phosphate
  modified_base 6: mod_base = OTHER; note = 2'-O-methylguanosine-3'-phosphate
  modified_base 7: mod_base = OTHER; note = 2'-deoxy-2'-fluorocytidine-3'-phosphate
  modified_base 8: mod_base = OTHER; note = 2'-O-methyluridine-3'-phosphate
  modified_base 9: mod_base = OTHER; note = 2'-deoxy-2'-fluoroguanosine-3'-phosphate
  modified_base 10: mod_base = OTHER; note = 2'-deoxy-2'-fluoroguanosine-3'-phosphate
  modified_base 11: mod_base = OTHER; note = 2'-deoxy-2'-fluoroguanosine-3'-phosphate
  modified_base 12: mod_base = OTHER; note = 2'-O-methyluridine-3'-phosphate
  modified_base 13: mod_base = OTHER; note = 2'-deoxy-2'-fluorouridine-3'-phosphate
  modified_base 14: mod_base = OTHER; note = 2'-O-methylguanosine-3'-phosphate
  modified_base 15: mod_base = OTHER; note = 2'-deoxy-2'-fluorouridine-3'-phosphate
  modified_base 16: mod_base = OTHER; note = 2'-O-methyluridine-3'-phosphate
  modified_base 17: mod_base = OTHER; note = 2'-deoxy-2'-fluoroadenosine-3'-phosphate
  modified_base 18: mod_base = OTHER; note = 2'-O-methylcytidine-3'-phosphate
  modified_base 19: mod_base = OTHER; note = 2'-deoxy-2'-fluorocytidine-3'-phosphate
  modified_base 20: mod_base = OTHER; note = 2'-O-methylguanosine-3'-phosphate
  modified_base 21: mod_base = OTHER; note = 2'-deoxy-2'-fluorocytidine-3'-phosphate ((2S,4R)-1-[29-[[2-(acetylamino)-2-deoxy-beta-D-galactopyra nosyl]oxy]-14,14-bis[[3-[[3-[[5-[[2-(acetylamino)-2-deoxy-b eta-D-galactopyranosyl]oxy]-1-oxopentyl]amino]propyl]amino] -3-oxopropoxy]methyl]-1,12,19,25-tetraoxo-16-oxa-13,20,24-t riazanonacos-1-yl]-4-hydroxy-2-pyrrolidinyl)methyl ester
tccacgctgggttgttaccgc

SEQ ID NO: 55 - RNA, 21 nt, synthetic construct
  source 1..21: mol_type = other RNA
  modified_base 1: mod_base = OTHER; note = 2'-deoxy-2'-fluorouridine-3'-phosphorothioate
  modified_base 2: mod_base = OTHER; note = 2'-O-methylguanosine-3'-phosphorothioate
  modified_base 3: mod_base = OTHER; note = 2'-deoxy-2'-fluorocytidine-3'-phosphate
  modified_base 4: mod_base = OTHER; note = 2'-O-methylcytidine-3'-phosphate
  modified_base 5: mod_base = OTHER; note = 2'-deoxy-2'-fluoroadenosine-3'-phosphate
  modified_base 6: mod_base = OTHER; note = 2'-O-methyladenosine-3'-phosphate
  modified_base 7: mod_base = OTHER; note = 2'-deoxy-2'-fluoroguanosine-3'-phosphate
  modified_base 8: mod_base = OTHER; note = 2'-O-methylcytidine-3'-phosphate
  modified_base 9: mod_base = OTHER; note = 2'-deoxy-2'-fluoroadenosine-3'-phosphate
  modified_base 10: mod_base = OTHER; note = 2'-deoxy-2'-fluoroguanosine-3'-phosphate
  modified_base 11: mod_base = OTHER; note = 2'-deoxy-2'-fluoroguanosine-3'-phosphate
  modified_base 12: mod_base = OTHER; note = 2'-O-methylguanosine-3'-phosphate
  modified_base 13: mod_base = OTHER; note = 2'-deoxy-2'-fluoroguanosine-3'-phosphate
  modified_base 14: mod_base = OTHER; note = 2'-O-methylguanosine-3'-phosphate
  modified_base 15: mod_base = OTHER; note = 2'-deoxy-2'-fluoroadenosine-3'-phosphate
  modified_base 16: mod_base = OTHER; note = 2'-O-methylcytidine-3'-phosphate
  modified_base 17: mod_base = OTHER; note = 2'-deoxy-2'-fluoroadenosine-3'-phosphate
  modified_base 18: mod_base = OTHER; note = 2'-O-methyladenosine-3'-phosphate
  modified_base 19: mod_base = OTHER; note = 2'-deoxy-2'-fluoroguanosine-3'-phosphate
  modified_base 20: mod_base = OTHER; note = 2'-O-methyluridine-3'-phosphate
  modified_base 21: mod_base = OTHER; note = 2'-deoxy-2'-fluoroadenosine-3'-phosphate ((2S,4R)-1-[29-[[2-(acetylamino)-2-deoxy-beta-D-galactopyra nosyl]oxy]-14,14-bis[[3-[[3-[[5-[[2-(acetylamino)-2-deoxy-b eta-D-galactopyranosyl]oxy]-1-oxopentyl]amino]propyl]amino] -3-oxopropoxy]methyl]-1,12,19,25-tetraoxo-16-oxa-13,20,24-t riazanonacos-1-yl]-4-hydroxy-2-pyrrolidinyl)methyl ester
tgccaagcagggggacaagta

SEQ ID NO: 56 - RNA, 21 nt, synthetic construct
  source 1..21: mol_type = other RNA
  modified_base 1: mod_base = OTHER; note = 2'-deoxy-2'-fluoroadenosine-3'-phosphorothioate
  modified_base 2: mod_base = OTHER; note = 2'-O-methyluridine-3'-phosphorothioate
  modified_base 3: mod_base = OTHER; note = 2'-deoxy-2'-fluorocytidine-3'-phosphate
  modified_base 4: mod_base = OTHER; note = 2'-O-methylcytidine-3'-phosphate
  modified_base 5: mod_base = OTHER; note = 2'-deoxy-2'-fluoroadenosine-3'-phosphate
  modified_base 6: mod_base = OTHER; note = 2'-O-methylguanosine-3'-phosphate
  modified_base 7: mod_base = OTHER; note = 2'-deoxy-2'-fluoroadenosine-3'-phosphate
  modified_base 8: mod_base = OTHER; note = 2'-O-methyladenosine-3'-phosphate
  modified_base 9: mod_base = OTHER; note = 2'-deoxy-2'-fluorocytidine-3'-phosphate
  modified_base 10: mod_base = OTHER; note = 2'-deoxy-2'-fluoroadenosine-3'-phosphate
  modified_base 11: mod_base = OTHER; note = 2'-deoxy-2'-fluoroguanosine-3'-phosphate
  modified_base 12: mod_base = OTHER; note = 2'-O-methylguanosine-3'-phosphate
  modified_base 13: mod_base = OTHER; note = 2'-deoxy-2'-fluoroadenosine-3'-phosphate
  modified_base 14: mod_base = OTHER; note = 2'-O-methylguanosine-3'-phosphate
  modified_base 15: mod_base = OTHER; note = 2'-deoxy-2'-fluoroguanosine-3'-phosphate
  modified_base 16: mod_base = OTHER; note = 2'-O-methylcytidine-3'-phosphate
  modified_base 17: mod_base = OTHER; note = 2'-deoxy-2'-fluorouridine-3'-phosphate
  modified_base 18: mod_base = OTHER; note = 2'-O-methylguanosine-3'-phosphate
  modified_base 19: mod_base = OTHER; note = 2'-deoxy-2'-fluorouridine-3'-phosphate
  modified_base 20: mod_base = OTHER; note = 2'-O-methylguanosine-3'-phosphate
  modified_base 21: mod_base = OTHER; note = 2'-deoxy-2'-fluorouridine-3'-phosphate ((2S,4R)-1-[29-[[2-(acetylamino)-2-deoxy-beta-D-galactopyra nosyl]oxy]-14,14-bis[[3-[[3-[[5-[[2-(acetylamino)-2-deoxy-b eta-D-galactopyranosyl]oxy]-1-oxopentyl]amino]propyl]amino] -3-oxopropoxy]methyl]-1,12,19,25-tetraoxo-16-oxa-13,20,24-t riazanonacos-1-yl]-4-hydroxy-2-pyrrolidinyl)methyl ester
atccagaacaggaggctgtgt

SEQ ID NO: 57 - RNA, 21 nt, synthetic construct
  source 1..21: mol_type = other RNA
  modified_base 1: mod_base = OTHER; note = 2'-deoxy-2'-fluorouridine-3'-phosphorothioate
  modified_base 2: mod_base = OTHER; note = 2'-O-methyluridine-3'-phosphorothioate
  modified_base 3: mod_base = OTHER; note = 2'-deoxy-2'-fluorocytidine-3'-phosphate
  modified_base 4: mod_base = OTHER; note = 2'-O-methyladenosine-3'-phosphate
  modified_base 5: mod_base = OTHER; note = 2'-deoxy-2'-fluorocytidine-3'-phosphate
  modified_base 6: mod_base = OTHER; note = 2'-O-methylcytidine-3'-phosphate
  modified_base 7: mod_base = OTHER; note = 2'-deoxy-2'-fluorouridine-3'-phosphate
  modified_base 8: mod_base = OTHER; note = 2'-O-methylcytidine-3'-phosphate
  modified_base 9: mod_base = OTHER; note = 2'-deoxy-2'-fluorocytidine-3'-phosphate
  modified_base 10: mod_base = OTHER; note = 2'-deoxy-2'-fluorocytidine-3'-phosphate
  modified_base 11: mod_base = OTHER; note = 2'-deoxy-2'-fluoroadenosine-3'-phosphate
  modified_base 12: mod_base = OTHER; note = 2'-O-methylguanosine-3'-phosphate
  modified_base 13: mod_base = OTHER; note = 2'-deoxy-2'-fluoroadenosine-3'-phosphate
  modified_base 14: mod_base = OTHER; note = 2'-O-methyluridine-3'-phosphate
  modified_base 15: mod_base = OTHER; note = 2'-deoxy-2'-fluorocytidine-3'-phosphate
  modified_base 16: mod_base = OTHER; note = 2'-O-methyluridine-3'-phosphate
  modified_base 17: mod_base = OTHER; note = 2'-deoxy-2'-fluorocytidine-3'-phosphate
  modified_base 18: mod_base = OTHER; note = 2'-O-methylcytidine-3'-phosphate
  modified_base 19: mod_base = OTHER; note = 2'-deoxy-2'-fluorocytidine-3'-phosphate
  modified_base 20: mod_base = OTHER; note = 2'-O-methyluridine-3'-phosphate
  modified_base 21: mod_base = OTHER; note = 2'-deoxy-2'-fluorocytidine-3'-phosphate ((2S,4R)-1-[29-[[2-(acetylamino)-2-deoxy-beta-D-galactopyra nosyl]oxy]-14,14-bis[[3-[[3-[[5-[[2-(acetylamino)-2-deoxy-b eta-D-galactopyranosyl]oxy]-1-oxopentyl]amino]propyl]amino] -3-oxopropoxy]methyl]-1,12,19,25-tetraoxo-16-oxa-13,20,24-t riazanonacos-1-yl]-4-hydroxy-2-pyrrolidinyl)methyl ester
ttcacctcccagatctccctc

SEQ ID NO: 58 - RNA, 21 nt, synthetic construct
  source 1..21: mol_type = other RNA
  modified_base 1: mod_base = OTHER; note = 2'-deoxy-2'-fluorocytidine-3'-phosphorothioate
  modified_base 2: mod_base = OTHER; note = 2'-O-methylcytidine-3'-phosphorothioate
  modified_base 3: mod_base = OTHER; note = 2'-deoxy-2'-fluorouridine-3'-phosphate
  modified_base 4: mod_base = OTHER; note = 2'-O-methylcytidine-3'-phosphate
  modified_base 5: mod_base = OTHER; note = 2'-deoxy-2'-fluorocytidine-3'-phosphate
  modified_base 6: mod_base = OTHER; note = 2'-O-methylguanosine-3'-phosphate
  modified_base 7: mod_base = OTHER; note = 2'-deoxy-2'-fluoroadenosine-3'-phosphate
  modified_base 8: mod_base = OTHER; note = 2'-O-methylguanosine-3'-phosphate
  modified_base 9: mod_base = OTHER; note = 2'-deoxy-2'-fluoroguanosine-3'-phosphate
  modified_base 10: mod_base = OTHER; note = 2'-deoxy-2'-fluoroguanosine-3'-phosphate
  modified_base 11: mod_base = OTHER; note = 2'-deoxy-2'-fluorouridine-3'-phosphate
  modified_base 12: mod_base = OTHER; note = 2'-O-methylguanosine-3'-phosphate
  modified_base 13: mod_base = OTHER; note = 2'-deoxy-2'-fluoroadenosine-3'-phosphate
  modified_base 14: mod_base = OTHER; note = 2'-O-methylguanosine-3'-phosphate
  modified_base 15: mod_base = OTHER; note = 2'-deoxy-2'-fluorouridine-3'-phosphate
  modified_base 16: mod_base = OTHER; note = 2'-O-methylguanosine-3'-phosphate
  modified_base 17: mod_base = OTHER; note = 2'-deoxy-2'-fluoroguanosine-3'-phosphate
  modified_base 18: mod_base = OTHER; note = 2'-O-methylcytidine-3'-phosphate
  modified_base 19: mod_base = OTHER; note = 2'-deoxy-2'-fluorocytidine-3'-phosphate
  modified_base 20: mod_base = OTHER; note = 2'-O-methyladenosine-3'-phosphate
  modified_base 21: mod_base = OTHER; note = 2'-deoxy-2'-fluorouridine-3'-phosphate ((2S,4R)-1-[29-[[2-(acetylamino)-2-deoxy-beta-D-galactopyra nosyl]oxy]-14,14-bis[[3-[[3-[[5-[[2-(acetylamino)-2-deoxy-b eta-D-galactopyranosyl]oxy]-1-oxopentyl]amino]propyl]amino] -3-oxopropoxy]methyl]-1,12,19,25-tetraoxo-16-oxa-13,20,24-t riazanonacos-1-yl]-4-hydroxy-2-pyrrolidinyl)methyl ester
cctccgagggtgagtggccat

SEQ ID NO: 59 - RNA, 21 nt, synthetic construct
  source 1..21: mol_type = other RNA
  modified_base 1: mod_base = OTHER; note = 2'-deoxy-2'-fluorouridine-3'-phosphorothioate
  modified_base 2: mod_base = OTHER; note = 2'-O-methylcytidine-3'-phosphorothioate
  modified_base 3: mod_base = OTHER; note = 2'-deoxy-2'-fluorocytidine-3'-phosphate
  modified_base 4: mod_base = OTHER; note = 2'-O-methyladenosine-3'-phosphate
  modified_base 5: mod_base = OTHER; note = 2'-deoxy-2'-fluoroguanosine-3'-phosphate
  modified_base 6: mod_base = OTHER; note = 2'-O-methyladenosine-3'-phosphate
  modified_base 7: mod_base = OTHER; note = 2'-deoxy-2'-fluoroadenosine-3'-phosphate
  modified_base 8: mod_base = OTHER; note = 2'-O-methylcytidine-3'-phosphate
  modified_base 9: mod_base = OTHER; note = 2'-deoxy-2'-fluoroadenosine-3'-phosphate
  modified_base 10: mod_base = OTHER; note = 2'-deoxy-2'-fluoroguanosine-3'-phosphate
  modified_base 11: mod_base = OTHER; note = 2'-deoxy-2'-fluoroguanosine-3'-phosphate
  modified_base 12: mod_base = OTHER; note = 2'-O-methyladenosine-3'-phosphate
  modified_base 13: mod_base = OTHER; note = 2'-deoxy-2'-fluoroguanosine-3'-phosphate
  modified_base 14: mod_base = OTHER; note = 2'-O-methylguanosine-3'-phosphate
  modified_base 15: mod_base = OTHER; note = 2'-deoxy-2'-fluorocytidine-3'-phosphate
  modified_base 16: mod_base = OTHER; note = 2'-O-methyluridine-3'-phosphate
  modified_base 17: mod_base = OTHER; note = 2'-deoxy-2'-fluoroguanosine-3'-phosphate
  modified_base 18: mod_base = OTHER; note = 2'-O-methyluridine-3'-phosphate
  modified_base 19: mod_base = OTHER; note = 2'-deoxy-2'-fluoroguanosine-3'-phosphate
  modified_base 20: mod_base = OTHER; note = 2'-O-methyluridine-3'-phosphate
  modified_base 21: mod_base = OTHER; note = 2'-deoxy-2'-fluoroguanosine-3'-phosphate ((2S,4R)-1-[29-[[2-(acetylamino)-2-deoxy-beta-D-galactopyra nosyl]oxy]-14,14-bis[[3-[[3-[[5-[[2-(acetylamino)-2-deoxy-b eta-D-galactopyranosyl]oxy]-1-oxopentyl]amino]propyl]amino] -3-oxopropoxy]methyl]-1,12,19,25-tetraoxo-16-oxa-13,20,24-t riazanonacos-1-yl]-4-hydroxy-2-pyrrolidinyl)methyl ester
tccagaacaggaggctgtgtg

SEQ ID NO: 60 - RNA, 21 nt, synthetic construct
  source 1..21: mol_type = other RNA
  modified_base 1: mod_base = OTHER; note = 2'-deoxy-2'-fluoroguanosine-3'-phosphorothioate
  modified_base 2: mod_base = OTHER; note = 2'-O-methyluridine-3'-phosphorothioate
  modified_base 3: mod_base = OTHER; note = 2'-deoxy-2'-fluoroguanosine-3'-phosphate
  modified_base 4: mod_base = OTHER; note = 2'-O-methyluridine-3'-phosphate
  modified_base 5: mod_base = OTHER; note = 2'-deoxy-2'-fluorocytidine-3'-phosphate
  modified_base 6: mod_base = OTHER; note = 2'-O-methylcytidine-3'-phosphate
  modified_base 7: mod_base = OTHER; note = 2'-deoxy-2'-fluorouridine-3'-phosphate
  modified_base 8: mod_base = OTHER; note = 2'-O-methylcytidine-3'-phosphate
  modified_base 9: mod_base = OTHER; note = 2'-deoxy-2'-fluorocytidine-3'-phosphate
  modified_base 10: mod_base = OTHER; note = 2'-deoxy-2'-fluoroguanosine-3'-phosphate
  modified_base 11: mod_base = OTHER; note = 2'-deoxy-2'-fluoroadenosine-3'-phosphate
  modified_base 12: mod_base = OTHER; note = 2'-O-methylguanosine-3'-phosphate
  modified_base 13: mod_base = OTHER; note = 2'-deoxy-2'-fluoroguanosine-3'-phosphate
  modified_base 14: mod_base = OTHER; note = 2'-O-methylguanosine-3'-phosphate
  modified_base 15: mod_base = OTHER; note = 2'-deoxy-2'-fluorouridine-3'-phosphate
  modified_base 16: mod_base = OTHER; note = 2'-O-methylguanosine-3'-phosphate
  modified_base 17: mod_base = OTHER; note = 2'-deoxy-2'-fluoroadenosine-3'-phosphate
  modified_base 18: mod_base = OTHER; note = 2'-O-methylguanosine-3'-phosphate
  modified_base 19: mod_base = OTHER; note = 2'-deoxy-2'-fluorouridine-3'-phosphate
  modified_base 20: mod_base = OTHER; note = 2'-O-methylguanosine-3'-phosphate
  modified_base 21: mod_base = OTHER; note = 2'-deoxy-2'-fluoroguanosine-3'-phosphate ((2S,4R)-1-[29-[[2-(acetylamino)-2-deoxy-beta-D-galactopyra nosyl]oxy]-14,14-bis[[3-[[3-[[5-[[2-(acetylamino)-2-deoxy-b eta-D-galactopyranosyl]oxy]-1-oxopentyl]amino]propyl]amino] -3-oxopropoxy]methyl]-1,12,19,25-tetraoxo-16-oxa-13,20,24-t riazanonacos-1-yl]-4-hydroxy-2-pyrrolidinyl)methyl ester
gtgtcctccgagggtgagtgg

SEQ ID NO: 61 - RNA, 21 nt, synthetic construct
  source 1..21: mol_type = other RNA
  modified_base 1: mod_base = OTHER; note = 2'-deoxy-2'-fluorouridine-3'-phosphorothioate
  modified_base 2: mod_base = OTHER; note = 2'-O-methyluridine-3'-phosphorothioate
  modified_base 3: mod_base = OTHER; note = 2'-deoxy-2'-fluorocytidine-3'-phosphate
  modified_base 4: mod_base = OTHER; note = 2'-O-methylguanosine-3'-phosphate
  modified_base 5: mod_base = OTHER; note = 2'-deoxy-2'-fluoroguanosine-3'-phosphate
  modified_base 6: mod_base = OTHER; note = 2'-O-methylguanosine-3'-phosphate
  modified_base 7: mod_base = OTHER; note = 2'-deoxy-2'-fluoroguanosine-3'-phosphate
  modified_base 8: mod_base = OTHER; note = 2'-O-methyluridine-3'-phosphate
  modified_base 9: mod_base = OTHER; note = 2'-deoxy-2'-fluorocytidine-3'-phosphate
  modified_base 10: mod_base = OTHER; note = 2'-deoxy-2'-fluoroguanosine-3'-phosphate
  modified_base 11: mod_base = OTHER; note = 2'-deoxy-2'-fluoroadenosine-3'-phosphate
  modified_base 12: mod_base = OTHER; note = 2'-O-methylcytidine-3'-phosphate
  modified_base 13: mod_base = OTHER; note = 2'-deoxy-2'-fluoroadenosine-3'-phosphate
  modified_base 14: mod_base = OTHER; note = 2'-O-methylcytidine-3'-phosphate
  modified_base 15: mod_base = OTHER; note = 2'-deoxy-2'-fluoroadenosine-3'-phosphate
  modified_base 16: mod_base = OTHER; note = 2'-O-methyluridine-3'-phosphate
  modified_base 17: mod_base = OTHER; note = 2'-deoxy-2'-fluorocytidine-3'-phosphate
  modified_base 18: mod_base = OTHER; note = 2'-O-methyluridine-3'-phosphate
  modified_base 19: mod_base = OTHER; note = 2'-deoxy-2'-fluoroguanosine-3'-phosphate
  modified_base 20: mod_base = OTHER; note = 2'-O-methyluridine-3'-phosphate
  modified_base 21: mod_base = OTHER; note = 2'-deoxy-2'-fluoroguanosine-3'-phosphate ((2S,4R)-1-[29-[[2-(acetylamino)-2-deoxy-beta-D-galactopyra nosyl]oxy]-14,14-bis[[3-[[3-[[5-[[2-(acetylamino)-2-deoxy-b eta-D-galactopyranosyl]oxy]-1-oxopentyl]amino]propyl]amino] -3-oxopropoxy]methyl]-1,12,19,25-tetraoxo-16-oxa-13,20,24-t riazanonacos-1-yl]-4-hydroxy-2-pyrrolidinyl)methyl ester
ttcggggtcgacacatctgtg

SEQ ID NO: 62 - RNA, 21 nt, synthetic construct
  source 1..21: mol_type = other RNA
  modified_base 1: mod_base = OTHER; note = 2'-deoxy-2'-fluorouridine-3'-phosphorothioate
  modified_base 2: mod_base = OTHER; note = 2'-O-methylcytidine-3'-phosphorothioate
  modified_base 3: mod_base = OTHER; note = 2'-deoxy-2'-fluoroguanosine-3'-phosphate
  modified_base 4: mod_base = OTHER; note = 2'-O-methylguanosine-3'-phosphate
  modified_base 5: mod_base = OTHER; note = 2'-deoxy-2'-fluoroguanosine-3'-phosphate
  modified_base 6: mod_base = OTHER; note = 2'-O-methylguanosine-3'-phosphate
  modified_base 7: mod_base = OTHER; note = 2'-deoxy-2'-fluorouridine-3'-phosphate
  modified_base 8: mod_base = OTHER; note = 2'-O-methylcytidine-3'-phosphate
  modified_base 9: mod_base = OTHER; note = 2'-deoxy-2'-fluoroguanosine-3'-phosphate
  modified_base 10: mod_base = OTHER; note = 2'-deoxy-2'-fluoroadenosine-3'-phosphate
  modified_base 11: mod_base = OTHER; note = 2'-deoxy-2'-fluorocytidine-3'-phosphate
  modified_base 12: mod_base = OTHER; note = 2'-O-methyladenosine-3'-phosphate
  modified_base 13: mod_base = OTHER; note = 2'-deoxy-2'-fluorocytidine-3'-phosphate
  modified_base 14: mod_base = OTHER; note = 2'-O-methyladenosine-3'-phosphate
  modified_base 15: mod_base = OTHER; note = 2'-deoxy-2'-fluorouridine-3'-phosphate
  modified_base 16: mod_base = OTHER; note = 2'-O-methylcytidine-3'-phosphate
  modified_base 17: mod_base = OTHER; note = 2'-deoxy-2'-fluorouridine-3'-phosphate
  modified_base 18: mod_base = OTHER; note = 2'-O-methylguanosine-3'-phosphate
  modified_base 19: mod_base = OTHER; note = 2'-deoxy-2'-fluorouridine-3'-phosphate
  modified_base 20: mod_base = OTHER; note = 2'-O-methylguanosine-3'-phosphate
  modified_base 21: mod_base = OTHER; note = 2'-deoxy-2'-fluoroguanosine-3'-phosphate ((2S,4R)-1-[29-[[2-(acetylamino)-2-deoxy-beta-D-galactopyra nosyl]oxy]-14,14-bis[[3-[[3-[[5-[[2-(acetylamino)-2-deoxy-b eta-D-galactopyranosyl]oxy]-1-oxopentyl]amino]propyl]amino] -3-oxopropoxy]methyl]-1,12,19,25-tetraoxo-16-oxa-13,20,24-t riazanonacos-1-yl]-4-hydroxy-2-pyrrolidinyl)methyl ester
tcggggtcgacacatctgtgg

SEQ ID NO: 63 - RNA, 21 nt, synthetic construct
  source 1..21: mol_type = other RNA
  modified_base 1: mod_base = OTHER; note = 2'-deoxy-2'-fluorouridine-3'-phosphorothioate
  modified_base 2: mod_base = OTHER; note = 2'-O-methylguanosine-3'-phosphorothioate
  modified_base 3: mod_base = OTHER; note = 2'-deoxy-2'-fluorocytidine-3'-phosphate
  modified_base 4: mod_base = OTHER; note = 2'-O-methyluridine-3'-phosphate
  modified_base 5: mod_base = OTHER; note = 2'-deoxy-2'-fluorouridine-3'-phosphate
  modified_base 6: mod_base = OTHER; note = 2'-O-methylcytidine-3'-phosphate
  modified_base 7: mod_base = OTHER; note = 2'-deoxy-2'-fluorocytidine-3'-phosphate
  modified_base 8: mod_base = OTHER; note = 2'-O-methyladenosine-3'-phosphate
  modified_base 9: mod_base = OTHER; note = 2'-deoxy-2'-fluoroguanosine-3'-phosphate
  modified_base 10: mod_base = OTHER; note = 2'-deoxy-2'-fluoroguanosine-3'-phosphate
  modified_base 11: mod_base = OTHER; note = 2'-deoxy-2'-fluoroadenosine-3'-phosphate
  modified_base 12: mod_base = OTHER; note = 2'-O-methylguanosine-3'-phosphate
  modified_base 13: mod_base = OTHER; note = 2'-deoxy-2'-fluoroguanosine-3'-phosphate
  modified_base 14: mod_base = OTHER; note = 2'-O-methyladenosine-3'-phosphate
  modified_base 15: mod_base = OTHER; note = 2'-deoxy-2'-fluorocytidine-3'-phosphate
  modified_base 16: mod_base = OTHER; note = 2'-O-methyladenosine-3'-phosphate
  modified_base 17: mod_base = OTHER; note = 2'-deoxy-2'-fluoroguanosine-3'-phosphate
  modified_base 18: mod_base = OTHER; note = 2'-O-methylcytidine-3'-phosphate
  modified_base 19: mod_base = OTHER; note = 2'-deoxy-2'-fluoroadenosine-3'-phosphate
  modified_base 20: mod_base = OTHER; note = 2'-O-methyluridine-3'-phosphate
  modified_base 21: mod_base = OTHER; note = 2'-deoxy-2'-fluoroguanosine-3'-phosphate ((2S,4R)-1-[29-[[2-(acetylamino)-2-deoxy-beta-D-galactopyra nosyl]oxy]-14,14-bis[[3-[[3-[[5-[[2-(acetylamino)-2-deoxy-b eta-D-galactopyranosyl]oxy]-1-oxopentyl]amino]propyl]amino] -3-oxopropoxy]methyl]-1,12,19,25-tetraoxo-16-oxa-13,20,24-t riazanonacos-1-yl]-4-hydroxy-2-pyrrolidinyl)methyl ester
tgcttccaggaggacagcatg

SEQ ID NO: 64 - RNA, 21 nt, synthetic construct
  source 1..21: mol_type = other RNA
  modified_base 1: mod_base = OTHER; note = 2'-deoxy-2'-fluorouridine-3'-phosphorothioate
  modified_base 2: mod_base = OTHER; note = 2'-O-methylcytidine-3'-phosphorothioate
  modified_base 3: mod_base = OTHER; note = 2'-deoxy-2'-fluorouridine-3'-phosphate
  modified_base 4: mod_base = OTHER; note = 2'-O-methylguanosine-3'-phosphate
  modified_base 5: mod_base = OTHER; note = 2'-deoxy-2'-fluoroguanosine-3'-phosphate
  modified_base 6: mod_base = OTHER; note = 2'-O-methyluridine-3'-phosphate
  modified_base 7: mod_base = OTHER; note = 2'-deoxy-2'-fluoroadenosine-3'-phosphate
  modified_base 8: mod_base = OTHER; note = 2'-O-methyluridine-3'-phosphate
  modified_base 9: mod_base = OTHER; note = 2'-deoxy-2'-fluorouridine-3'-phosphate
  modified_base 10: mod_base = OTHER; note = 2'-deoxy-2'-fluorouridine-3'-phosphate
  modified_base 11: mod_base = OTHER; note = 2'-deoxy-2'-fluorocytidine-3'-phosphate
  modified_base 12: mod_base = OTHER; note = 2'-O-methylcytidine-3'-phosphate
  modified_base 13: mod_base = OTHER; note = 2'-deoxy-2'-fluorouridine-3'-phosphate
  modified_base 14: mod_base = OTHER; note = 2'-O-methyladenosine-3'-phosphate
  modified_base 15: mod_base = OTHER; note = 2'-deoxy-2'-fluoroguanosine-3'-phosphate
  modified_base 16: mod_base = OTHER; note = 2'-O-methylguanosine-3'-phosphate
  modified_base 17: mod_base = OTHER; note = 2'-deoxy-2'-fluoroguanosine-3'-phosphate
  modified_base 18: mod_base = OTHER; note = 2'-O-methyluridine-3'-phosphate
  modified_base 19: mod_base = OTHER; note = 2'-deoxy-2'-fluoroadenosine-3'-phosphate
  modified_base 20: mod_base = OTHER; note = 2'-O-methylcytidine-3'-phosphate
  modified_base 21: mod_base = OTHER; note = 2'-deoxy-2'-fluoroadenosine-3'-phosphate ((2S,4R)-1-[29-[[2-(acetylamino)-2-deoxy-beta-D-galactopyra nosyl]oxy]-14,14-bis[[3-[[3-[[5-[[2-(acetylamino)-2-deoxy-b eta-D-galactopyranosyl]oxy]-1-oxopentyl]amino]propyl]amino] -3-oxopropoxy]methyl]-1,12,19,25-tetraoxo-16-oxa-13,20,24-t riazanonacos-1-yl]-4-hydroxy-2-pyrrolidinyl)methyl ester
tctggtatttcctagggtaca

SEQ ID NO: 65 - RNA, 23 nt, synthetic construct
  source 1..23: mol_type = other RNA
  modified_base 1: mod_base = OTHER; note = 2'-O-methyluridine-3'-phosphorothioate
  modified_base 2: mod_base = OTHER; note = 2'-deoxy-2'-fluorouridine-3'-phosphorothioate
  modified_base 3: mod_base = OTHER; note = 2'-O-methylguanosine-3'-phosphate
  modified_base 4: mod_base = OTHER; note = 2'-deoxy-2'-fluoroadenosine-3'-phosphate
  modified_base 5: mod_base = OTHER; note = 2'-O-methyladenosine-3'-phosphate
  modified_base 6: mod_base = OTHER; note = 2'-deoxy-2'-fluoroguanosine-3'-phosphate
  modified_base 7: mod_base = OTHER; note = 2'-O-methylguanosine-3'-phosphate
  modified_base 8: mod_base = OTHER; note = 2'-deoxy-2'-fluoroadenosine-3'-phosphate
  modified_base 9: mod_base = OTHER; note = 2'-O-methylcytidine-3'-phosphate
  modified_base 10: mod_base = OTHER; note = 2'-deoxy-2'-fluoroadenosine-3'-phosphate
  modified_base 11: mod_base = OTHER; note = 2'-O-methylcytidine-3'-phosphate
  modified_base 12: mod_base = OTHER; note = 2'-O-methylcytidine-3'-phosphate
  modified_base 13: mod_base = OTHER; note = 2'-O-methyluridine-3'-phosphate
  modified_base 14: mod_base = OTHER; note = 2'-deoxy-2'-fluorocytidine-3'-phosphate
  modified_base 15: mod_base = OTHER; note = 2'-O-methyluridine-3'-phosphate
  modified_base 16: mod_base = OTHER; note = 2'-deoxy-2'-fluorocytidine-3'-phosphate
  modified_base 17: mod_base = OTHER; note = 2'-O-methylcytidine-3'-phosphate
  modified_base 18: mod_base = OTHER; note = 2'-deoxy-2'-fluoroadenosine-3'-phosphate
  modified_base 19: mod_base = OTHER; note = 2'-O-methylguanosine-3'-phosphate
  modified_base 20: mod_base = OTHER; note = 2'-deoxy-2'-fluoroguanosine-3'-phosphate
  modified_base 21: mod_base = OTHER; note = 2'-O-methylcytidine-3'-phosphorothioate
  modified_base 22: mod_base = OTHER; note = 2'-deoxy-2'-fluorocytidine-3'-phosphorothioate
  modified_base 23: mod_base = OTHER; note = 2'-O-methyladenosine
ttgaaggacacctctccaggcca

SEQ ID NO: 66 - RNA, 23 nt, synthetic construct
  source 1..23: mol_type = other RNA
  modified_base 1: mod_base = OTHER; note = 2'-O-methyladenosine-3'-phosphorothioate
  modified_base 2: mod_base = OTHER; note = 2'-deoxy-2'-fluoroguanosine-3'-phosphorothioate
  modified_base 3: mod_base = OTHER; note = 2'-O-methylguanosine-3'-phosphate
  modified_base 4: mod_base = OTHER; note = 2'-deoxy-2'-fluoroadenosine-3'-phosphate
  modified_base 5: mod_base = OTHER; note = 2'-O-methyladenosine-3'-phosphate
  modified_base 6: mod_base = OTHER; note = 2'-deoxy-2'-fluoroadenosine-3'-phosphate
  modified_base 7: mod_base = OTHER; note = 2'-O-methyluridine-3'-phosphate
  modified_base 8: mod_base = OTHER; note = 2'-deoxy-2'-fluoroadenosine-3'-phosphate
  modified_base 9: mod_base = OTHER; note = 2'-O-methylcytidine-3'-phosphate
  modified_base 10: mod_base = OTHER; note = 2'-deoxy-2'-fluorocytidine-3'-phosphate
  modified_base 11: mod_base = OTHER; note = 2'-O-methyladenosine-3'-phosphate
  modified_base 12: mod_base = OTHER; note = 2'-O-methylguanosine-3'-phosphate
  modified_base 13: mod_base = OTHER; note = 2'-O-methyladenosine-3'-phosphate
  modified_base 14: mod_base = OTHER; note = 2'-deoxy-2'-fluoroguanosine-3'-phosphate
  modified_base 15: mod_base = OTHER; note = 2'-O-methyluridine-3'-phosphate
  modified_base 16: mod_base = OTHER; note = 2'-deoxy-2'-fluoroadenosine-3'-phosphate
  modified_base 17: mod_base = OTHER; note = 2'-O-methylguanosine-3'-phosphate
  modified_base 18: mod_base = OTHER; note = 2'-deoxy-2'-fluorocytidine-3'-phosphate
  modified_base 19: mod_base = OTHER; note = 2'-O-methyladenosine-3'-phosphate
  modified_base 20: mod_base = OTHER; note = 2'-deoxy-2'-fluorocytidine-3'-phosphate
  modified_base 21: mod_base = OTHER; note = 2'-O-methylcytidine-3'-phosphorothioate
  modified_base 22: mod_base = OTHER; note = 2'-deoxy-2'-fluorocytidine-3'-phosphorothioate
  modified_base 23: mod_base = OTHER; note = 2'-O-methylcytidine
aggaaataccagagtagcacccc

SEQ ID NO: 67 - RNA, 23 nt, synthetic construct
  source 1..23: mol_type = other RNA
  modified_base 1: mod_base = OTHER; note = 2'-O-methyladenosine-3'-phosphorothioate
  modified_base 2: mod_base = OTHER; note = 2'-deoxy-2'-fluoroguanosine-3'-phosphorothioate
  modified_base 3: mod_base = OTHER; note = 2'-O-methyluridine-3'-phosphate
  modified_base 4: mod_base = OTHER; note = 2'-deoxy-2'-fluorouridine-3'-phosphate
  modified_base 5: mod_base = OTHER; note = 2'-O-methyluridine-3'-phosphate
  modified_base 6: mod_base = OTHER; note = 2'-deoxy-2'-fluorocytidine-3'-phosphate
  modified_base 7: mod_base = OTHER; note = 2'-O-methyluridine-3'-phosphate
  modified_base 8: mod_base = OTHER; note = 2'-deoxy-2'-fluorocytidine-3'-phosphate
  modified_base 9: mod_base = OTHER; note = 2'-O-methyluridine-3'-phosphate
  modified_base 10: mod_base = OTHER; note = 2'-deoxy-2'-fluorocytidine-3'-phosphate
  modified_base 11: mod_base = OTHER; note = 2'-O-methyladenosine-3'-phosphate
  modified_base 12: mod_base = OTHER; note = 2'-O-methyluridine-3'-phosphate
  modified_base 13: mod_base = OTHER; note = 2'-O-methylcytidine-3'-phosphate
  modified_base 14: mod_base = OTHER; note = 2'-deoxy-2'-fluorocytidine-3'-phosphate
  modified_base 15: mod_base = OTHER; note = 2'-O-methyladenosine-3'-phosphate
  modified_base 16: mod_base = OTHER; note = 2'-deoxy-2'-fluoroguanosine-3'-phosphate
  modified_base 17: mod_base = OTHER; note = 2'-O-methylguanosine-3'-phosphate
  modified_base 18: mod_base = OTHER; note = 2'-deoxy-2'-fluorocytidine-3'-phosphate
  modified_base 19: mod_base = OTHER; note = 2'-O-methylcytidine-3'-phosphate
  modified_base 20: mod_base = OTHER; note = 2'-deoxy-2'-fluoroguanosine-3'-phosphate
  modified_base 21: mod_base = OTHER; note = 2'-O-methyluridine-3'-phosphorothioate
  modified_base 22: mod_base = OTHER; note = 2'-deoxy-2'-fluorouridine-3'-phosphorothioate
  modified_base 23: mod_base = OTHER; note = 2'-O-methylguanosine
agtttctctcatccaggccgttg

SEQ ID NO: 68 - RNA, 23 nt, synthetic construct
  source 1..23: mol_type = other RNA
  modified_base 1: mod_base = OTHER; note = 2'-O-methyladenosine-3'-phosphorothioate
  modified_base 2: mod_base = OTHER; note = 2'-deoxy-2'-fluoroadenosine-3'-phosphorothioate
  modified_base 3: mod_base = OTHER; note = 2'-O-methylguanosine-3'-phosphate
  modified_base 4: mod_base = OTHER; note = 2'-deoxy-2'-fluoroadenosine-3'-phosphate
  modified_base 5: mod_base = OTHER; note = 2'-O-methyluridine-3'-phosphate
  modified_base 6: mod_base = OTHER; note = 2'-deoxy-2'-fluorocytidine-3'-phosphate
  modified_base 7: mod_base = OTHER; note = 2'-O-methylcytidine-3'-phosphate
  modified_base 8: mod_base = OTHER; note = 2'-deoxy-2'-fluorouridine-3'-phosphate
  modified_base 9: mod_base = OTHER; note = 2'-O-methylguanosine-3'-phosphate
  modified_base 10: mod_base = OTHER; note = 2'-deoxy-2'-fluoroguanosine-3'-phosphate
  modified_base 11: mod_base = OTHER; note = 2'-O-methylguanosine-3'-phosphate
  modified_base 12: mod_base = OTHER; note = 2'-O-methyladenosine-3'-phosphate
  modified_base 13: mod_base = OTHER; note = 2'-O-methylguanosine-3'-phosphate
  modified_base 14: mod_base = OTHER; note = 2'-deoxy-2'-fluoroadenosine-3'-phosphate
  modified_base 15: mod_base = OTHER; note = 2'-O-methyladenosine-3'-phosphate
  modified_base 16: mod_base = OTHER; note = 2'-deoxy-2'-fluoroguanosine-3'-phosphate
  modified_base 17: mod_base = OTHER; note = 2'-O-methyluridine-3'-phosphate
  modified_base 18: mod_base = OTHER; note = 2'-deoxy-2'-fluoroguanosine-3'-phosphate
  modified_base 19: mod_base = OTHER; note = 2'-O-methylguanosine-3'-phosphate
  modified_base 20: mod_base = OTHER; note = 2'-deoxy-2'-fluorocytidine-3'-phosphate
  modified_base 21: mod_base = OTHER; note = 2'-O-methylguanosine-3'-phosphorothioate
  modified_base 22: mod_base = OTHER; note = 2'-deoxy-2'-fluoroadenosine-3'-phosphorothioate
  modified_base 23: mod_base = OTHER; note = 2'-O-methyluridine
aagatcctgggagaagtggcgat

SEQ ID NO: 69 - RNA, 23 nt, synthetic construct
  source 1..23: mol_type = other RNA
  modified_base 1: mod_base = OTHER; note = 2'-O-methyladenosine-3'-phosphorothioate
  modified_base 2: mod_base = OTHER; note = 2'-deoxy-2'-fluorocytidine-3'-phosphorothioate
  modified_base 3: mod_base = OTHER; note = 2'-O-methyladenosine-3'-phosphate
  modified_base 4: mod_base = OTHER; note = 2'-deoxy-2'-fluoroadenosine-3'-phosphate
  modified_base 5: mod_base = OTHER; note = 2'-O-methylguanosine-3'-phosphate
  modified_base 6: mod_base = OTHER; note = 2'-deoxy-2'-fluoroadenosine-3'-phosphate
  modified_base 7: mod_base = OTHER; note = 2'-O-methyluridine-3'-phosphate
  modified_base 8: mod_base = OTHER; note = 2'-deoxy-2'-fluoroguanosine-3'-phosphate
  modified_base 9: mod_base = OTHER; note = 2'-O-methylcytidine-3'-phosphate
  modified_base 10: mod_base = OTHER; note = 2'-deoxy-2'-fluorocytidine-3'-phosphate
  modified_base 11: mod_base = OTHER; note = 2'-O-methyladenosine-3'-phosphate
  modified_base 12: mod_base = OTHER; note = 2'-O-methylcytidine-3'-phosphate
  modified_base 13: mod_base = OTHER; note = 2'-O-methylcytidine-3'-phosphate
  modified_base 14: mod_base = OTHER; note = 2'-deoxy-2'-fluorouridine-3'-phosphate
  modified_base 15: mod_base = OTHER; note = 2'-O-methylcytidine-3'-phosphate
  modified_base 16: mod_base = OTHER; note = 2'-deoxy-2'-fluorocytidine-3'-phosphate
  modified_base 17: mod_base = OTHER; note = 2'-O-methyluridine-3'-phosphate
  modified_base 18: mod_base = OTHER; note = 2'-deoxy-2'-fluoroguanosine-3'-phosphate
  modified_base 19: mod_base = OTHER; note = 2'-O-methylcytidine-3'-phosphate
  modified_base 20: mod_base = OTHER; note = 2'-deoxy-2'-fluorocytidine-3'-phosphate
  modified_base 21: mod_base = OTHER; note = 2'-O-methyladenosine-3'-phosphorothioate
  modified_base 22: mod_base = OTHER; note = 2'-deoxy-2'-fluorocytidine-3'-phosphorothioate
  modified_base 23: mod_base = OTHER; note = 2'-O-methylcytidine
acaagatgccacctcctgccacc

SEQ ID NO: 70 - RNA, 23 nt, synthetic construct
  source 1..23: mol_type = other RNA
  modified_base 1: mod_base = OTHER; note = 2'-O-methyladenosine-3'-phosphorothioate
  modified_base 2: mod_base = OTHER; note = 2'-deoxy-2'-fluorocytidine-3'-phosphorothioate
  modified_base 3: mod_base = OTHER; note = 2'-O-methylguanosine-3'-phosphate
  modified_base 4: mod_base = OTHER; note = 2'-deoxy-2'-fluorouridine-3'-phosphate
  modified_base 5: mod_base = OTHER; note = 2'-O-methylcytidine-3'-phosphate
  modified_base 6: mod_base = OTHER; note = 2'-deoxy-2'-fluoroadenosine-3'-phosphate
  modified_base 7: mod_base = OTHER; note = 2'-O-methyluridine-3'-phosphate
  modified_base 8: mod_base = OTHER; note = 2'-deoxy-2'-fluoroadenosine-3'-phosphate
  modified_base 9: mod_base = OTHER; note = 2'-O-methylcytidine-3'-phosphate
  modified_base 10: mod_base = OTHER; note = 2'-deoxy-2'-fluoroadenosine-3'-phosphate
  modified_base 11: mod_base = OTHER; note = 2'-O-methyluridine-3'-phosphate
  modified_base 12: mod_base = OTHER; note = 2'-O-methylguanosine-3'-phosphate
  modified_base 13: mod_base = OTHER; note = 2'-O-methylguanosine-3'-phosphate
  modified_base 14: mod_base = OTHER; note = 2'-deoxy-2'-fluorocytidine-3'-phosphate
  modified_base 15: mod_base = OTHER; note = 2'-O-methylcytidine-3'-phosphate
  modified_base 16: mod_base = OTHER; note = 2'-deoxy-2'-fluoroadenosine-3'-phosphate
  modified_base 17: mod_base = OTHER; note = 2'-O-methylguanosine-3'-phosphate
  modified_base 18: mod_base = OTHER; note = 2'-deoxy-2'-fluorouridine-3'-phosphate
  modified_base 19: mod_base = OTHER; note = 2'-O-methylcytidine-3'-phosphate
  modified_base 20: mod_base = OTHER; note = 2'-deoxy-2'-fluoroguanosine-3'-phosphate
  modified_base 21: mod_base = OTHER; note = 2'-O-methylguanosine-3'-phosphorothioate
  modified_base 22: mod_base = OTHER; note = 2'-deoxy-2'-fluorouridine-3'-phosphorothioate
  modified_base 23: mod_base = OTHER; note = 2'-O-methylcytidine
acgtcatacatggccagtcggtc

SEQ ID NO: 71 - RNA, 23 nt, synthetic construct
  source 1..23: mol_type = other RNA
  modified_base 1: mod_base = OTHER; note = 2'-O-methyladenosine-3'-phosphorothioate
  modified_base 2: mod_base = OTHER; note = 2'-deoxy-2'-fluoroadenosine-3'-phosphorothioate
  modified_base 3: mod_base = OTHER; note = 2'-O-methylguanosine-3'-phosphate
  modified_base 4: mod_base = OTHER; note = 2'-deoxy-2'-fluorocytidine-3'-phosphate
  modified_base 5: mod_base = OTHER; note = 2'-O-methylcytidine-3'-phosphate
  modified_base 6: mod_base = OTHER; note = 2'-deoxy-2'-fluoroadenosine-3'-phosphate
  modified_base 7: mod_base = OTHER; note = 2'-O-methyluridine-3'-phosphate
  modified_base 8: mod_base = OTHER; note = 2'-deoxy-2'-fluoroadenosine-3'-phosphate
  modified_base 9: mod_base = OTHER; note = 2'-O-methylguanosine-3'-phosphate
  modified_base 10: mod_base = OTHER; note = 2'-deoxy-2'-fluorouridine-3'-phosphate
  modified_base 11: mod_base = OTHER; note = 2'-O-methylguanosine-3'-phosphate
  modified_base 12: mod_base = OTHER; note = 2'-O-methylcytidine-3'-phosphate
  modified_base 13: mod_base = OTHER; note = 2'-O-methyladenosine-3'-phosphate
  modified_base 14: mod_base = OTHER; note = 2'-deoxy-2'-fluorocytidine-3'-phosphate
  modified_base 15: mod_base = OTHER; note = 2'-O-methylcytidine-3'-phosphate
  modified_base 16: mod_base = OTHER; note = 2'-deoxy-2'-fluorocytidine-3'-phosphate
  modified_base 17: mod_base = OTHER; note = 2'-O-methylguanosine-3'-phosphate
  modified_base 18: mod_base = OTHER; note = 2'-deoxy-2'-fluorocytidine-3'-phosphate
  modified_base 19: mod_base = OTHER; note = 2'-O-methyladenosine-3'-phosphate
  modified_base 20: mod_base = OTHER; note = 2'-deoxy-2'-fluorocytidine-3'-phosphate
  modified_base 21: mod_base = OTHER; note = 2'-O-methyladenosine-3'-phosphorothioate
  modified_base 22: mod_base = OTHER; note = 2'-deoxy-2'-fluorocytidine-3'-phosphorothioate
  modified_base 23: mod_base = OTHER; note = 2'-O-methylcytidine
aagccatagtgcacccgcacacc

SEQ ID NO: 72 - RNA, 23 nt, synthetic construct
  source 1..23: mol_type = other RNA
  modified_base 1: mod_base = OTHER; note = 2'-O-methyladenosine-3'-phosphorothioate
  modified_base 2: mod_base = OTHER; note = 2'-deoxy-2'-fluorocytidine-3'-phosphorothioate
  modified_base 3: mod_base = OTHER; note = 2'-O-methylguanosine-3'-phosphate
  modified_base 4: mod_base = OTHER; note = 2'-deoxy-2'-fluorocytidine-3'-phosphate
  modified_base 5: mod_base = OTHER; note = 2'-O-methyladenosine-3'-phosphate
  modified_base 6: mod_base = OTHER; note = 2'-deoxy-2'-fluoroguanosine-3'-phosphate
  modified_base 7: mod_base = OTHER; note = 2'-O-methyluridine-3'-phosphate
  modified_base 8: mod_base = OTHER; note = 2'-deoxy-2'-fluorouridine-3'-phosphate
  modified_base 9: mod_base = OTHER; note = 2'-O-methyluridine-3'-phosphate
  modified_base 10: mod_base = OTHER; note = 2'-deoxy-2'-fluorocytidine-3'-phosphate
  modified_base 11: mod_base = OTHER; note = 2'-O-methyluridine-3'-phosphate
  modified_base 12: mod_base = OTHER; note = 2'-O-methylcytidine-3'-phosphate
  modified_base 13: mod_base = OTHER; note = 2'-O-methyluridine-3'-phosphate
  modified_base 14: mod_base = OTHER; note = 2'-deoxy-2'-fluorocytidine-3'-phosphate
  modified_base 15: mod_base = OTHER; note = 2'-O-methyladenosine-3'-phosphate
  modified_base 16: mod_base = OTHER; note = 2'-deoxy-2'-fluorouridine-3'-phosphate
  modified_base 17: mod_base = OTHER; note = 2'-O-methylcytidine-3'-phosphate
  modified_base 18: mod_base = OTHER; note = 2'-deoxy-2'-fluorocytidine-3'-phosphate
  modified_base 19: mod_base = OTHER; note = 2'-O-methyladenosine-3'-phosphate
  modified_base 20: mod_base = OTHER; note = 2'-deoxy-2'-fluoroguanosine-3'-phosphate
  modified_base 21: mod_base = OTHER; note = 2'-O-methylguanosine-3'-phosphorothioate
  modified_base 22: mod_base = OTHER; note = 2'-deoxy-2'-fluorocytidine-3'-phosphorothioate
  modified_base 23: mod_base = OTHER; note = 2'-O-methylcytidine
acgcagtttctctcatccaggcc

SEQ ID NO: 73 - RNA, 23 nt, synthetic construct
  source 1..23: mol_type = other RNA
  modified_base 1: mod_base = OTHER; note = 2'-O-methyluridine-3'-phosphorothioate
  modified_base 2: mod_base = OTHER; note = 2'-deoxy-2'-fluorouridine-3'-phosphorothioate
  modified_base 3: mod_base = OTHER; note = 2'-O-methylguanosine-3'-phosphate
  modified_base 4: mod_base = OTHER; note = 2'-deoxy-2'-fluorouridine-3'-phosphate
  modified_base 5: mod_base = OTHER; note = 2'-O-methyladenosine-3'-phosphate
  modified_base 6: mod_base = OTHER; note = 2'-deoxy-2'-fluorocytidine-3'-phosphate
  modified_base 7: mod_base = OTHER; note = 2'-O-methylcytidine-3'-phosphate
  modified_base 8: mod_base = OTHER; note = 2'-deoxy-2'-fluorocytidine-3'-phosphate
  modified_base 9: mod_base = OTHER; note = 2'-O-methyluridine-3'-phosphate
  modified_base 10: mod_base = OTHER; note = 2'-deoxy-2'-fluoroadenosine-3'-phosphate
  modified_base 11: mod_base = OTHER; note = 2'-O-methylguanosine-3'-phosphate
  modified_base 12: mod_base = OTHER; note = 2'-O-methylguanosine-3'-phosphate
  modified_base 13: mod_base = OTHER; note = 2'-O-methyladenosine-3'-phosphate
  modified_base 14: mod_base = OTHER; note = 2'-deoxy-2'-fluoroadenosine-3'-phosphate
  modified_base 15: mod_base = OTHER; note = 2'-O-methyladenosine-3'-phosphate
  modified_base 16: mod_base = OTHER; note = 2'-deoxy-2'-fluorouridine-3'-phosphate
  modified_base 17: mod_base = OTHER; note = 2'-O-methyladenosine-3'-phosphate
  modified_base 18: mod_base = OTHER; note = 2'-deoxy-2'-fluorocytidine-3'-phosphate
  modified_base 19: mod_base = OTHER; note = 2'-O-methylcytidine-3'-phosphate
  modified_base 20: mod_base = OTHER; note = 2'-deoxy-2'-fluoroadenosine-3'-phosphate
  modified_base 21: mod_base = OTHER; note = 2'-O-methylguanosine-3'-phosphorothioate
  modified_base 22: mod_base = OTHER; note = 2'-deoxy-2'-fluoroadenosine-3'-phosphorothioate
  modified_base 23: mod_base = OTHER; note = 2'-O-methylguanosine
ttgtaccctaggaaataccagag

SEQ ID NO: 74 - RNA, 23 nt, synthetic construct
  source 1..23: mol_type = other RNA
  modified_base 1: mod_base = OTHER; note = 2'-O-methyladenosine-3'-phosphorothioate
  modified_base 2: mod_base = OTHER; note = 2'-deoxy-2'-fluoroguanosine-3'-phosphorothioate
  modified_base 3: mod_base = OTHER; note = 2'-O-methyladenosine-3'-phosphate
  modified_base 4: mod_base = OTHER; note = 2'-deoxy-2'-fluorouridine-3'-phosphate
  modified_base 5: mod_base = OTHER; note = 2'-O-methylcytidine-3'-phosphate
  modified_base 6: mod_base = OTHER; note = 2'-deoxy-2'-fluorocytidine-3'-phosphate
  modified_base 7: mod_base = OTHER; note = 2'-O-methylcytidine-3'-phosphate
  modified_base 8: mod_base = OTHER; note = 2'-deoxy-2'-fluoroadenosine-3'-phosphate
  modified_base 9: mod_base = OTHER; note = 2'-O-methyladenosine-3'-phosphate
  modified_base 10: mod_base = OTHER; note = 2'-deoxy-2'-fluoroguanosine-3'-phosphate
  modified_base 11: mod_base = OTHER; note = 2'-O-methyluridine-3'-phosphate
  modified_base 12: mod_base = OTHER; note = 2'-O-methyluridine-3'-phosphate
  modified_base 13: mod_base = OTHER; note = 2'-O-methyladenosine-3'-phosphate
  modified_base 14: mod_base = OTHER; note = 2'-deoxy-2'-fluoroguanosine-3'-phosphate
  modified_base 15: mod_base = OTHER; note = 2'-O-methyladenosine-3'-phosphate
  modified_base 16: mod_base = OTHER; note = 2'-deoxy-2'-fluorocytidine-3'-phosphate
  modified_base 17: mod_base = OTHER; note = 2'-O-methylcytidine-3'-phosphate
  modified_base 18: mod_base = OTHER; note = 2'-deoxy-2'-fluoroadenosine-3'-phosphate
  modified_base 19: mod_base = OTHER; note = 2'-O-methylguanosine-3'-phosphate
  modified_base 20: mod_base = OTHER; note = 2'-deoxy-2'-fluoroguanosine-3'-phosphate
  modified_base 21: mod_base = OTHER; note = 2'-O-methylguanosine-3'-phosphorothioate
  modified_base 22: mod_base = OTHER; note = 2'-deoxy-2'-fluoroguanosine-3'-phosphorothioate
  modified_base 23: mod_base = OTHER; note = 2'-O-methylcytidine
agatcccaagttagaccaggggc

SEQ ID NO: 75 - RNA, 23 nt, synthetic construct
  source 1..23: mol_type = other RNA
  modified_base 1: mod_base = OTHER; note = 2'-O-methyladenosine-3'-phosphorothioate
  modified_base 2: mod_base = OTHER; note = 2'-deoxy-2'-fluorocytidine-3'-phosphorothioate
  modified_base 3: mod_base = OTHER; note = 2'-O-methylguanosine-3'-phosphate
  modified_base 4: mod_base = OTHER; note = 2'-deoxy-2'-fluoroguanosine-3'-phosphate
  modified_base 5: mod_base = OTHER; note = 2'-O-methylcytidine-3'-phosphate
  modified_base 6: mod_base = OTHER; note = 2'-deoxy-2'-fluoroadenosine-3'-phosphate
  modified_base 7: mod_base = OTHER; note = 2'-O-methyladenosine-3'-phosphate
  modified_base 8: mod_base = OTHER; note = 2'-deoxy-2'-fluoroadenosine-3'-phosphate
  modified_base 9: mod_base = OTHER; note = 2'-O-methyluridine-3'-phosphate
  modified_base 10: mod_base = OTHER; note = 2'-deoxy-2'-fluorocytidine-3'-phosphate
  modified_base 11: mod_base = OTHER; note = 2'-O-methyladenosine-3'-phosphate
  modified_base 12: mod_base = OTHER; note = 2'-O-methyluridine-3'-phosphate
  modified_base 13: mod_base = OTHER; note = 2'-O-methyladenosine-3'-phosphate
  modified_base 14: mod_base = OTHER; note = 2'-deoxy-2'-fluorocytidine-3'-phosphate
  modified_base 15: mod_base = OTHER; note = 2'-O-methyluridine-3'-phosphate
  modified_base 16: mod_base = OTHER; note = 2'-deoxy-2'-fluorouridine-3'-phosphate
  modified_base 17: mod_base = OTHER; note = 2'-O-methylcytidine-3'-phosphate
  modified_base 18: mod_base = OTHER; note = 2'-deoxy-2'-fluorouridine-3'-phosphate
  modified_base 19: mod_base = OTHER; note = 2'-O-methylguanosine-3'-phosphate
  modified_base 20: mod_base = OTHER; note = 2'-deoxy-2'-fluorocytidine-3'-phosphate
  modified_base 21: mod_base = OTHER; note = 2'-O-methylcytidine-3'-phosphorothioate
  modified_base 22: mod_base = OTHER; note = 2'-deoxy-2'-fluorouridine-3'-phosphorothioate
  modified_base 23: mod_base = OTHER; note = 2'-O-methylcytidine
acggcaaatcatacttctgcctc

SEQ ID NO: 76 - RNA, 23 nt, synthetic construct
  source 1..23: mol_type = other RNA
  modified_base 1: mod_base = OTHER; note = 2'-O-methyladenosine-3'-phosphorothioate
  modified_base 2: mod_base = OTHER; note = 2'-deoxy-2'-fluoroguanosine-3'-phosphorothioate
  modified_base 3: mod_base = OTHER; note = 2'-O-methylcytidine-3'-phosphate
  modified_base 4: mod_base = OTHER; note = 2'-deoxy-2'-fluorouridine-3'-phosphate
  modified_base 5: mod_base = OTHER; note = 2'-O-methyladenosine-3'-phosphate
  modified_base 6: mod_base = OTHER; note = 2'-deoxy-2'-fluorouridine-3'-phosphate
  modified_base 7: mod_base = OTHER; note = 2'-O-methylguanosine-3'-phosphate
  modified_base 8: mod_base = OTHER; note = 2'-deoxy-2'-fluorouridine-3'-phosphate
  modified_base 9: mod_base = OTHER; note = 2'-O-methylcytidine-3'-phosphate
  modified_base 10: mod_base = OTHER; note = 2'-deoxy-2'-fluorouridine-3'-phosphate
  modified_base 11: mod_base = OTHER; note = 2'-O-methyluridine-3'-phosphate
  modified_base 12: mod_base = OTHER; note = 2'-O-methyluridine-3'-phosphate
  modified_base 13: mod_base = OTHER; note = 2'-O-methylcytidine-3'-phosphate
  modified_base 14: mod_base = OTHER; note = 2'-deoxy-2'-fluoroadenosine-3'-phosphate
  modified_base 15: mod_base = OTHER; note = 2'-O-methylcytidine-3'-phosphate
  modified_base 16: mod_base = OTHER; note = 2'-deoxy-2'-fluoroadenosine-3'-phosphate
  modified_base 17: mod_base = OTHER; note = 2'-O-methylcytidine-3'-phosphate
  modified_base 18: mod_base = OTHER; note = 2'-deoxy-2'-fluorouridine-3'-phosphate
  modified_base 19: mod_base = OTHER; note = 2'-O-methylguanosine-3'-phosphate
  modified_base 20: mod_base = OTHER; note = 2'-deoxy-2'-fluoroguanosine-3'-phosphate
  modified_base 21: mod_base = OTHER; note = 2'-O-methylcytidine-3'-phosphorothioate
  modified_base 22: mod_base = OTHER; note = 2'-deoxy-2'-fluorouridine-3'-phosphorothioate
  modified_base 23: mod_base = OTHER; note = 2'-O-methyluridine
agctatgtctttcacactggctt

SEQ ID NO: 77 - RNA, 23 nt, synthetic construct
  source 1..23: mol_type = other RNA
  modified_base 1: mod_base = OTHER; note = 2'-O-methyladenosine-3'-phosphorothioate
  modified_base 2: mod_base = OTHER; note = 2'-deoxy-2'-fluorouridine-3'-phosphorothioate
  modified_base 3: mod_base = OTHER; note = 2'-O-methyladenosine-3'-phosphate
  modified_base 4: mod_base = OTHER; note = 2'-deoxy-2'-fluorocytidine-3'-phosphate
  modified_base 5: mod_base = OTHER; note = 2'-O-methyladenosine-3'-phosphate
  modified_base 6: mod_base = OTHER; note = 2'-deoxy-2'-fluorouridine-3'-phosphate
  modified_base 7: mod_base = OTHER; note = 2'-O-methylguanosine-3'-phosphate
  modified_base 8: mod_base = OTHER; note = 2'-deoxy-2'-fluoroguanosine-3'-phosphate
  modified_base 9: mod_base = OTHER; note = 2'-O-methylcytidine-3'-phosphate
  modified_base 10: mod_base = OTHER; note = 2'-deoxy-2'-fluorocytidine-3'-phosphate
  modified_base 11: mod_base = OTHER; note = 2'-O-methyladenosine-3'-phosphate
  modified_base 12: mod_base = OTHER; note = 2'-O-methylguanosine-3'-phosphate
  modified_base 13: mod_base = OTHER; note = 2'-O-methyluridine-3'-phosphate
  modified_base 14: mod_base = OTHER; note = 2'-deoxy-2'-fluorocytidine-3'-phosphate
  modified_base 15: mod_base = OTHER; note = 2'-O-methylguanosine-3'-phosphate
  modified_base 16: mod_base = OTHER; note = 2'-deoxy-2'-fluoroguanosine-3'-phosphate
  modified_base 17: mod_base = OTHER; note = 2'-O-methyluridine-3'-phosphate
  modified_base 18: mod_base = OTHER; note = 2'-deoxy-2'-fluorocytidine-3'-phosphate
  modified_base 19: mod_base = OTHER; note = 2'-O-methylcytidine-3'-phosphate
  modified_base 20: mod_base = OTHER; note = 2'-deoxy-2'-fluorocytidine-3'-phosphate
  modified_base 21: mod_base = OTHER; note = 2'-O-methylguanosine-3'-phosphorothioate
  modified_base 22: mod_base = OTHER; note = 2'-deoxy-2'-fluoroguanosine-3'-phosphorothioate
  modified_base 23: mod_base = OTHER; note = 2'-O-methylcytidine
atacatggccagtcggtcccggc

SEQ ID NO: 78 - RNA, 23 nt, synthetic construct
  source 1..23: mol_type = other RNA
  modified_base 1: mod_base = OTHER; note = 2'-O-methyladenosine-3'-phosphorothioate
  modified_base 2: mod_base = OTHER; note = 2'-deoxy-2'-fluorouridine-3'-phosphorothioate
  modified_base 3: mod_base = OTHER; note = 2'-O-methylguanosine-3'-phosphate
  modified_base 4: mod_base = OTHER; note = 2'-deoxy-2'-fluorouridine-3'-phosphate
  modified_base 5: mod_base = OTHER; note = 2'-O-methylguanosine-3'-phosphate
  modified_base 6: mod_base = OTHER; note = 2'-deoxy-2'-fluorouridine-3'-phosphate
  modified_base 7: mod_base = OTHER; note = 2'-O-methylcytidine-3'-phosphate
  modified_base 8: mod_base = OTHER; note = 2'-deoxy-2'-fluoroguanosine-3'-phosphate
  modified_base 9: mod_base = OTHER; note = 2'-O-methyladenosine-3'-phosphate
  modified_base 10: mod_base = OTHER; note = 2'-deoxy-2'-fluorocytidine-3'-phosphate
  modified_base 11: mod_base = OTHER; note = 2'-O-methylcytidine-3'-phosphate
  modified_base 12: mod_base = OTHER; note = 2'-O-methylcytidine-3'-phosphate
  modified_base 13: mod_base = OTHER; note = 2'-O-methylcytidine-3'-phosphate
  modified_base 14: mod_base = OTHER; note = 2'-deoxy-2'-fluoroguanosine-3'-phosphate
  modified_base 15: mod_base = OTHER; note = 2'-O-methyladenosine-3'-phosphate
  modified_base 16: mod_base = OTHER; note = 2'-deoxy-2'-fluoroadenosine-3'-phosphate
  modified_base 17: mod_base = OTHER; note = 2'-O-methylcytidine-3'-phosphate
  modified_base 18: mod_base = OTHER; note = 2'-deoxy-2'-fluorocytidine-3'-phosphate
  modified_base 19: mod_base = OTHER; note = 2'-O-methyluridine-3'-phosphate
  modified_base 20: mod_base = OTHER; note = 2'-deoxy-2'-fluoroguanosine-3'-phosphate
  modified_base 21: mod_base = OTHER; note = 2'-O-methylguanosine-3'-phosphorothioate
  modified_base 22: mod_base = OTHER; note = 2'-deoxy-2'-fluoroadenosine-3'-phosphorothioate
  modified_base 23: mod_base = OTHER; note = 2'-O-methylguanosine
atgtgtcgaccccgaacctggag

SEQ ID NO: 79 - RNA, 23 nt, synthetic construct
  source 1..23: mol_type = other RNA
  modified_base 1: mod_base = OTHER; note = 2'-O-methylguanosine-3'-phosphorothioate
  modified_base 2: mod_base = OTHER; note = 2'-deoxy-2'-fluoroadenosine-3'-phosphorothioate
  modified_base 3: mod_base = OTHER; note = 2'-O-methyluridine-3'-phosphate
  modified_base 4: mod_base = OTHER; note = 2'-deoxy-2'-fluorocytidine-3'-phosphate
  modified_base 5: mod_base = OTHER; note = 2'-O-methylcytidine-3'-phosphate
  modified_base 6: mod_base = OTHER; note = 2'-deoxy-2'-fluorocytidine-3'-phosphate
  modified_base 7: mod_base = OTHER; note = 2'-O-methyladenosine-3'-phosphate
  modified_base 8: mod_base = OTHER; note = 2'-deoxy-2'-fluoroadenosine-3'-phosphate
  modified_base 9: mod_base = OTHER; note = 2'-O-methylguanosine-3'-phosphate
  modified_base 10: mod_base = OTHER; note = 2'-deoxy-2'-fluorouridine-3'-phosphate
  modified_base 11: mod_base = OTHER; note = 2'-O-methyluridine-3'-phosphate
  modified_base 12: mod_base = OTHER; note = 2'-O-methyladenosine-3'-phosphate
  modified_base 13: mod_base = OTHER; note = 2'-O-methylguanosine-3'-phosphate
  modified_base 14: mod_base = OTHER; note = 2'-deoxy-2'-fluoroadenosine-3'-phosphate
  modified_base 15: mod_base = OTHER; note = 2'-O-methylcytidine-3'-phosphate
  modified_base 16: mod_base = OTHER; note = 2'-deoxy-2'-fluorocytidine-3'-phosphate
  modified_base 17: mod_base = OTHER; note = 2'-O-methyladenosine-3'-phosphate
  modified_base 18: mod_base = OTHER; note = 2'-deoxy-2'-fluoroguanosine-3'-phosphate
  modified_base 19: mod_base = OTHER; note = 2'-O-methylguanosine-3'-phosphate
  modified_base 20: mod_base = OTHER; note = 2'-deoxy-2'-fluoroguanosine-3'-phosphate
  modified_base 21: mod_base = OTHER; note = 2'-O-methylguanosine-3'-phosphorothioate
  modified_base 22: mod_base = OTHER; note = 2'-deoxy-2'-fluorocytidine-3'-phosphorothioate
  modified_base 23: mod_base = OTHER; note = 2'-O-methyluridine
gatcccaagttagaccaggggct

SEQ ID NO: 80 - RNA, 23 nt, synthetic construct
  source 1..23: mol_type = other RNA
  modified_base 1: mod_base = OTHER; note = 2'-O-methyluridine-3'-phosphorothioate
  modified_base 2: mod_base = OTHER; note = 2'-deoxy-2'-fluoroadenosine-3'-phosphorothioate
  modified_base 3: mod_base = OTHER; note = 2'-O-methyladenosine-3'-phosphate
  modified_base 4: mod_base = OTHER; note = 2'-deoxy-2'-fluoroguanosine-3'-phosphate
  modified_base 5: mod_base = OTHER; note = 2'-O-methyladenosine-3'-phosphate
  modified_base 6: mod_base = OTHER; note = 2'-deoxy-2'-fluorouridine-3'-phosphate
  modified_base 7: mod_base = OTHER; note = 2'-O-methylcytidine-3'-phosphate
  modified_base 8: mod_base = OTHER; note = 2'-deoxy-2'-fluorocytidine-3'-phosphate
  modified_base 9: mod_base = OTHER; note = 2'-O-methyluridine-3'-phosphate
  modified_base 10: mod_base = OTHER; note = 2'-deoxy-2'-fluoroguanosine-3'-phosphate
  modified_base 11: mod_base = OTHER; note = 2'-O-methylguanosine-3'-phosphate
  modified_base 12: mod_base = OTHER; note = 2'-O-methylguanosine-3'-phosphate
  modified_base 13: mod_base = OTHER; note = 2'-O-methyladenosine-3'-phosphate
  modified_base 14: mod_base = OTHER; note = 2'-deoxy-2'-fluoroguanosine-3'-phosphate
  modified_base 15: mod_base = OTHER; note = 2'-O-methyladenosine-3'-phosphate
  modified_base 16: mod_base = OTHER; note = 2'-deoxy-2'-fluoroadenosine-3'-phosphate
  modified_base 17: mod_base = OTHER; note = 2'-O-methylguanosine-3'-phosphate
  modified_base 18: mod_base = OTHER; note = 2'-deoxy-2'-fluorouridine-3'-phosphate
  modified_base 19: mod_base = OTHER; note = 2'-O-methylguanosine-3'-phosphate
  modified_base 20: mod_base = OTHER; note = 2'-deoxy-2'-fluoroguanosine-3'-phosphate
  modified_base 21: mod_base = OTHER; note = 2'-O-methylcytidine-3'-phosphorothioate
  modified_base 22: mod_base = OTHER; note = 2'-deoxy-2'-fluoroguanosine-3'-phosphorothioate
  modified_base 23: mod_base = OTHER; note = 2'-O-methyladenosine
taagatcctgggagaagtggcga

SEQ ID NO: 81 - RNA, 23 nt, synthetic construct
  source 1..23: mol_type = other RNA
  modified_base 1: mod_base = OTHER; note = 2'-O-methyluridine-3'-phosphorothioate
  modified_base 2: mod_base = OTHER; note = 2'-deoxy-2'-fluoroguanosine-3'-phosphorothioate
  modified_base 3: mod_base = OTHER; note = 2'-O-methyluridine-3'-phosphate
  modified_base 4: mod_base = OTHER; note = 2'-deoxy-2'-fluoroadenosine-3'-phosphate
  modified_base 5: mod_base = OTHER; note = 2'-O-methylcytidine-3'-phosphate
  modified_base 6: mod_base = OTHER; note = 2'-deoxy-2'-fluorocytidine-3'-phosphate
  modified_base 7: mod_base = OTHER; note = 2'-O-methylcytidine-3'-phosphate
  modified_base 8: mod_base = OTHER; note = 2'-deoxy-2'-fluorouridine-3'-phosphate
  modified_base 9: mod_base = OTHER; note = 2'-O-methyladenosine-3'-phosphate
  modified_base 10: mod_base = OTHER; note = 2'-deoxy-2'-fluoroguanosine-3'-phosphate
  modified_base 11: mod_base = OTHER; note = 2'-O-methylguanosine-3'-phosphate
  modified_base 12: mod_base = OTHER; note = 2'-O-methyladenosine-3'-phosphate
  modified_base 13: mod_base = OTHER; note = 2'-O-methyladenosine-3'-phosphate
  modified_base 14: mod_base = OTHER; note = 2'-deoxy-2'-fluoroadenosine-3'-phosphate
  modified_base 15: mod_base = OTHER; note = 2'-O-methyluridine-3'-phosphate
  modified_base 16: mod_base = OTHER; note = 2'-deoxy-2'-fluoroadenosine-3'-phosphate
  modified_base 17: mod_base = OTHER; note = 2'-O-methylcytidine-3'-phosphate
  modified_base 18: mod_base = OTHER; note = 2'-deoxy-2'-fluorocytidine-3'-phosphate
  modified_base 19: mod_base = OTHER; note = 2'-O-methyladenosine-3'-phosphate
  modified_base 20: mod_base = OTHER; note = 2'-deoxy-2'-fluoroguanosine-3'-phosphate
  modified_base 21: mod_base = OTHER; note = 2'-O-methyladenosine-3'-phosphorothioate
  modified_base 22: mod_base = OTHER; note = 2'-deoxy-2'-fluoroguanosine-3'-phosphorothioate
  modified_base 23: mod_base = OTHER; note = 2'-O-methyluridine
tgtaccctaggaaataccagagt

SEQ ID NO: 82 - RNA, 23 nt, synthetic construct
  source 1..23: mol_type = other RNA
  modified_base 1: mod_base = OTHER; note = 2'-O-methyluridine-3'-phosphorothioate
  modified_base 2: mod_base = OTHER; note = 2'-deoxy-2'-fluoroguanosine-3'-phosphorothioate
  modified_base 3: mod_base = OTHER; note = 2'-O-methyluridine-3'-phosphate
  modified_base 4: mod_base = OTHER; note = 2'-deoxy-2'-fluorouridine-3'-phosphate
  modified_base 5: mod_base = OTHER; note = 2'-O-methyladenosine-3'-phosphate
  modified_base 6: mod_base = OTHER; note = 2'-deoxy-2'-fluorouridine-3'-phosphate
  modified_base 7: mod_base = OTHER; note = 2'-O-methylcytidine-3'-phosphate
  modified_base 8: mod_base = OTHER; note = 2'-deoxy-2'-fluoroadenosine-3'-phosphate
  modified_base 9: mod_base = OTHER; note = 2'-O-methylcytidine-3'-phosphate
  modified_base 10: mod_base = OTHER; note = 2'-deoxy-2'-fluorocytidine-3'-phosphate
  modified_base 11: mod_base = OTHER; note = 2'-O-methylcytidine-3'-phosphate
  modified_base 12: mod_base = OTHER; note = 2'-O-methyladenosine-3'-phosphate
  modified_base 13: mod_base = OTHER; note = 2'-O-methylguanosine-3'-phosphate
  modified_base 14: mod_base = OTHER; note = 2'-deoxy-2'-fluorocytidine-3'-phosphate
  modified_base 15: mod_base = OTHER; note = 2'-O-methylguanosine-3'-phosphate
  modified_base 16: mod_base = OTHER; note = 2'-deoxy-2'-fluoroguanosine-3'-phosphate
  modified_base 17: mod_base = OTHER; note = 2'-O-methyluridine-3'-phosphate
  modified_base 18: mod_base = OTHER; note = 2'-deoxy-2'-fluorocytidine-3'-phosphate
  modified_base 19: mod_base = OTHER; note = 2'-O-methyladenosine-3'-phosphate
  modified_base 20: mod_base = OTHER; note = 2'-deoxy-2'-fluoroguanosine-3'-phosphate
  modified_base 21: mod_base = OTHER; note = 2'-O-methylcytidine-3'-phosphorothioate
  modified_base 22: mod_base = OTHER; note = 2'-deoxy-2'-fluoroguanosine-3'-phosphorothioate
  modified_base 23: mod_base = OTHER; note = 2'-O-methyladenosine
tgttatcacccagcggtcagcga

SEQ ID NO: 83 - RNA, 23 nt, synthetic construct
  source 1..23: mol_type = other RNA
  modified_base 1: mod_base = OTHER; note = 2'-O-methyluridine-3'-phosphorothioate
  modified_base 2: mod_base = OTHER; note = 2'-deoxy-2'-fluorocytidine-3'-phosphorothioate
  modified_base 3: mod_base = OTHER; note = 2'-O-methyluridine-3'-phosphate
  modified_base 4: mod_base = OTHER; note = 2'-deoxy-2'-fluorocytidine-3'-phosphate
  modified_base 5: mod_base = OTHER; note = 2'-O-methyluridine-3'-phosphate
  modified_base 6: mod_base = OTHER; note = 2'-deoxy-2'-fluorocytidine-3'-phosphate
  modified_base 7: mod_base = OTHER; note = 2'-O-methyladenosine-3'-phosphate
  modified_base 8: mod_base = OTHER; note = 2'-deoxy-2'-fluorouridine-3'-phosphate
  modified_base 9: mod_base = OTHER; note = 2'-O-methylcytidine-3'-phosphate
  modified_base 10: mod_base = OTHER; note = 2'-deoxy-2'-fluorocytidine-3'-phosphate
  modified_base 11: mod_base = OTHER; note = 2'-O-methyladenosine-3'-phosphate
  modified_base 12: mod_base = OTHER; note = 2'-O-methylguanosine-3'-phosphate
  modified_base 13: mod_base = OTHER; note = 2'-O-methylguanosine-3'-phosphate
  modified_base 14: mod_base = OTHER; note = 2'-deoxy-2'-fluorocytidine-3'-phosphate
  modified_base 15: mod_base = OTHER; note = 2'-O-methylcytidine-3'-phosphate
  modified_base 16: mod_base = OTHER; note = 2'-deoxy-2'-fluoroguanosine-3'-phosphate
  modified_base 17: mod_base = OTHER; note = 2'-O-methyluridine-3'-phosphate
  modified_base 18: mod_base = OTHER; note = 2'-deoxy-2'-fluorouridine-3'-phosphate
  modified_base 19: mod_base = OTHER; note = 2'-O-methylguanosine-3'-phosphate
  modified_base 20: mod_base = OTHER; note = 2'-deoxy-2'-fluoroguanosine-3'-phosphate
  modified_base 21: mod_base = OTHER; note = 2'-O-methylguanosine-3'-phosphorothioate
  modified_base 22: mod_base = OTHER; note = 2'-deoxy-2'-fluoroguanosine-3'-phosphorothioate
  modified_base 23: mod_base = OTHER; note = 2'-O-methylcytidine
tctctcatccaggccgttggggc

SEQ ID NO: 84 - RNA, 23 nt, synthetic construct
  source 1..23: mol_type = other RNA
  modified_base 1: mod_base = OTHER; note = 2'-O-methylguanosine-3'-phosphorothioate
  modified_base 2: mod_base = OTHER; note = 2'-deoxy-2'-fluoroadenosine-3'-phosphorothioate
  modified_base 3: mod_base = OTHER; note = 2'-O-methyladenosine-3'-phosphate
  modified_base 4: mod_base = OTHER; note = 2'-deoxy-2'-fluorouridine-3'-phosphate
  modified_base 5: mod_base = OTHER; note = 2'-O-methyladenosine-3'-phosphate
  modified_base 6: mod_base = OTHER; note = 2'-deoxy-2'-fluorocytidine-3'-phosphate
  modified_base 7: mod_base = OTHER; note = 2'-O-methyluridine-3'-phosphate
  modified_base 8: mod_base = OTHER; note = 2'-deoxy-2'-fluorouridine-3'-phosphate
  modified_base 9: mod_base = OTHER; note = 2'-O-methylguanosine-3'-phosphate
  modified_base 10: mod_base = OTHER; note = 2'-deoxy-2'-fluorouridine-3'-phosphate
  modified_base 11: mod_base = OTHER; note = 2'-O-methylcytidine-3'-phosphate
  modified_base 12: mod_base = OTHER; note = 2'-O-methylcytidine-3'-phosphate
  modified_base 13: mod_base = OTHER; note = 2'-O-methylcytidine-3'-phosphate
  modified_base 14: mod_base = OTHER; note = 2'-deoxy-2'-fluorocytidine-3'-phosphate
  modified_base 15: mod_base = OTHER; note = 2'-O-methylcytidine-3'-phosphate
  modified_base 16: mod_base = OTHER; note = 2'-deoxy-2'-fluorouridine-3'-phosphate
  modified_base 17: mod_base = OTHER; note = 2'-O-methylguanosine-3'-phosphate
  modified_base 18: mod_base = OTHER; note = 2'-deoxy-2'-fluorocytidine-3'-phosphate
  modified_base 19: mod_base = OTHER; note = 2'-O-methyluridine-3'-phosphate
  modified_base 20: mod_base = OTHER; note = 2'-deoxy-2'-fluorouridine-3'-phosphate
  modified_base 21: mod_base = OTHER; note = 2'-O-methylguanosine-3'-phosphorothioate
  modified_base 22: mod_base = OTHER; note = 2'-deoxy-2'-fluoroguanosine-3'-phosphorothioate
  modified_base 23: mod_base = OTHER; note = 2'-O-methylcytidine
gaatacttgtccccctgcttggc

SEQ ID NO: 85 - RNA, 23 nt, synthetic construct
  source 1..23: mol_type = other RNA
  modified_base 1: mod_base = OTHER; note = 2'-O-methyluridine-3'-phosphorothioate
  modified_base 2: mod_base = OTHER; note = 2'-deoxy-2'-fluorouridine-3'-phosphorothioate
  modified_base 3: mod_base = OTHER; note = 2'-O-methylcytidine-3'-phosphate
  modified_base 4: mod_base = OTHER; note = 2'-deoxy-2'-fluoroguanosine-3'-phosphate
  modified_base 5: mod_base = OTHER; note = 2'-O-methyluridine-3'-phosphate
  modified_base 6: mod_base = OTHER; note = 2'-deoxy-2'-fluoroadenosine-3'-phosphate
  modified_base 7: mod_base = OTHER; note = 2'-O-methylcytidine-3'-phosphate
  modified_base 8: mod_base = OTHER; note = 2'-deoxy-2'-fluorouridine-3'-phosphate
  modified_base 9: mod_base = OTHER; note = 2'-O-methylcytidine-3'-phosphate
  modified_base 10: mod_base = OTHER; note = 2'-deoxy-2'-fluoroguanosine-3'-phosphate
  modified_base 11: mod_base = OTHER; note = 2'-O-methylguanosine-3'-phosphate
  modified_base 12: mod_base = OTHER; note = 2'-O-methylcytidine-3'-phosphate
  modified_base 13: mod_base = OTHER; note = 2'-O-methylcytidine-3'-phosphate
  modified_base 14: mod_base = OTHER; note = 2'-deoxy-2'-fluorocytidine-3'-phosphate
  modified_base 15: mod_base = OTHER; note = 2'-O-methyluridine-3'-phosphate
  modified_base 16: mod_base = OTHER; note = 2'-deoxy-2'-fluoroguanosine-3'-phosphate
  modified_base 17: mod_base = OTHER; note = 2'-O-methyluridine-3'-phosphate
  modified_base 18: mod_base = OTHER; note = 2'-deoxy-2'-fluoroadenosine-3'-phosphate
  modified_base 19: mod_base = OTHER; note = 2'-O-methylguanosine-3'-phosphate
  modified_base 20: mod_base = OTHER; note = 2'-deoxy-2'-fluoroguanosine-3'-phosphate
  modified_base 21: mod_base = OTHER; note = 2'-O-methylguanosine-3'-phosphorothioate
  modified_base 22: mod_base = OTHER; note = 2'-deoxy-2'-fluoroguanosine-3'-phosphorothioate
  modified_base 23: mod_base = OTHER; note = 2'-O-methyladenosine
ttcgtactcggccctgtagggga

SEQ ID NO: 86 - RNA, 23 nt, synthetic construct
  source 1..23: mol_type = other RNA
  modified_base 1: mod_base = OTHER; note = 2'-O-methyluridine-3'-phosphorothioate
  modified_base 2: mod_base = OTHER; note = 2'-deoxy-2'-fluoroadenosine-3'-phosphorothioate
  modified_base 3: mod_base = OTHER; note = 2'-O-methylguanosine-3'-phosphate
  modified_base 4: mod_base = OTHER; note = 2'-deoxy-2'-fluorocytidine-3'-phosphate
  modified_base 5: mod_base = OTHER; note = 2'-O-methyluridine-3'-phosphate
  modified_base 6: mod_base = OTHER; note = 2'-deoxy-2'-fluoroguanosine-3'-phosphate
  modified_base 7: mod_base = OTHER; note = 2'-O-methyluridine-3'-phosphate
  modified_base 8: mod_base = OTHER; note = 2'-deoxy-2'-fluoroadenosine-3'-phosphate
  modified_base 9: mod_base = OTHER; note = 2'-O-methylguanosine-3'-phosphate
  modified_base 10: mod_base = OTHER; note = 2'-deoxy-2'-fluorocytidine-3'-phosphate
  modified_base 11: mod_base = OTHER; note = 2'-O-methylguanosine-3'-phosphate
  modified_base 12: mod_base = OTHER; note = 2'-O-methylguanosine-3'-phosphate
  modified_base 13: mod_base = OTHER; note = 2'-O-methyluridine-3'-phosphate
  modified_base 14: mod_base = OTHER; note = 2'-deoxy-2'-fluoroadenosine-3'-phosphate
  modified_base 15: mod_base = OTHER; note = 2'-O-methyladenosine-3'-phosphate
  modified_base 16: mod_base = OTHER; note = 2'-deoxy-2'-fluorocytidine-3'-phosphate
  modified_base 17: mod_base = OTHER; note = 2'-O-methyladenosine-3'-phosphate
  modified_base 18: mod_base = OTHER; note = 2'-deoxy-2'-fluoroadenosine-3'-phosphate
  modified_base 19: mod_base = OTHER; note = 2'-O-methylcytidine-3'-phosphate
  modified_base 20: mod_base = OTHER; note = 2'-deoxy-2'-fluorocytidine-3'-phosphate
  modified_base 21: mod_base = OTHER; note = 2'-O-methylcytidine-3'-phosphorothioate
  modified_base 22: mod_base = OTHER; note = 2'-deoxy-2'-fluoroadenosine-3'-phosphorothioate
  modified_base 23: mod_base = OTHER; note = 2'-O-methylguanosine
tagctgtagcggtaacaacccag

SEQ ID NO: 87 - RNA, 23 nt, synthetic construct
  source 1..23: mol_type = other RNA
  modified_base 1: mod_base = OTHER; note = 2'-O-methyluridine-3'-phosphorothioate
  modified_base 2: mod_base = OTHER; note = 2'-deoxy-2'-fluoroguanosine-3'-phosphorothioate
  modified_base 3: mod_base = OTHER; note = 2'-O-methyladenosine-3'-phosphate
  modified_base 4: mod_base = OTHER; note = 2'-deoxy-2'-fluoroadenosine-3'-phosphate
  modified_base 5: mod_base = OTHER; note = 2'-O-methylguanosine-3'-phosphate
  modified_base 6: mod_base = OTHER; note = 2'-deoxy-2'-fluoroguanosine-3'-phosphate
  modified_base 7: mod_base = OTHER; note = 2'-O-methyladenosine-3'-phosphate
  modified_base 8: mod_base = OTHER; note = 2'-deoxy-2'-fluorocytidine-3'-phosphate
  modified_base 9: mod_base = OTHER; note = 2'-O-methyladenosine-3'-phosphate
  modified_base 10: mod_base = OTHER; note = 2'-deoxy-2'-fluorocytidine-3'-phosphate
  modified_base 11: mod_base = OTHER; note = 2'-O-methylcytidine-3'-phosphate
  modified_base 12: mod_base = OTHER; note = 2'-O-methyluridine-3'-phosphate
  modified_base 13: mod_base = OTHER; note = 2'-O-methylcytidine-3'-phosphate
  modified_base 14: mod_base = OTHER; note = 2'-deoxy-2'-fluorouridine-3'-phosphate
  modified_base 15: mod_base = OTHER; note = 2'-O-methylcytidine-3'-phosphate
  modified_base 16: mod_base = OTHER; note = 2'-deoxy-2'-fluorocytidine-3'-phosphate
  modified_base 17: mod_base = OTHER; note = 2'-O-methyladenosine-3'-phosphate
  modified_base 18: mod_base = OTHER; note = 2'-deoxy-2'-fluoroguanosine-3'-phosphate
  modified_base 19: mod_base = OTHER; note = 2'-O-methylguanosine-3'-phosphate
  modified_base 20: mod_base = OTHER; note = 2'-deoxy-2'-fluorocytidine-3'-phosphate
  modified_base 21: mod_base = OTHER; note = 2'-O-methylcytidine-3'-phosphorothioate
  modified_base 22: mod_base = OTHER; note = 2'-deoxy-2'-fluoroadenosine-3'-phosphorothioate
  modified_base 23: mod_base = OTHER; note = 2'-O-methylguanosine
tgaaggacacctctccaggccag

SEQ ID NO: 88 - RNA, 23 nt, synthetic construct
  source 1..23: mol_type = other RNA
  modified_base 1: mod_base = OTHER; note = 2'-O-methyluridine-3'-phosphorothioate
  modified_base 2: mod_base = OTHER; note = 2'-deoxy-2'-fluoroadenosine-3'-phosphorothioate
  modified_base 3: mod_base = OTHER; note = 2'-O-methylcytidine-3'-phosphate
  modified_base 4: mod_base = OTHER; note = 2'-deoxy-2'-fluoroadenosine-3'-phosphate
  modified_base 5: mod_base = OTHER; note = 2'-O-methyladenosine-3'-phosphate
  modified_base 6: mod_base = OTHER; note = 2'-deoxy-2'-fluoroguanosine-3'-phosphate
  modified_base 7: mod_base = OTHER; note = 2'-O-methylcytidine-3'-phosphate
  modified_base 8: mod_base = OTHER; note = 2'-deoxy-2'-fluorocytidine-3'-phosphate
  modified_base 9: mod_base = OTHER; note = 2'-O-methyladenosine-3'-phosphate
  modified_base 10: mod_base = OTHER; note = 2'-deoxy-2'-fluorouridine-3'-phosphate
  modified_base 11: mod_base = OTHER; note = 2'-O-methyladenosine-3'-phosphate
  modified_base 12: mod_base = OTHER; note = 2'-O-methylguanosine-3'-phosphate
  modified_base 13: mod_base = OTHER; note = 2'-O-methyluridine-3'-phosphate
  modified_base 14: mod_base = OTHER; note = 2'-deoxy-2'-fluoroguanosine-3'-phosphate
  modified_base 15: mod_base = OTHER; note = 2'-O-methylcytidine-3'-phosphate
  modified_base 16: mod_base = OTHER; note = 2'-deoxy-2'-fluoroadenosine-3'-phosphate
  modified_base 17: mod_base = OTHER; note = 2'-O-methylcytidine-3'-phosphate
  modified_base 18: mod_base = OTHER; note = 2'-deoxy-2'-fluorocytidine-3'-phosphate
  modified_base 19: mod_base = OTHER; note = 2'-O-methylcytidine-3'-phosphate
  modified_base 20: mod_base = OTHER; note = 2'-deoxy-2'-fluoroguanosine-3'-phosphate
  modified_base 21: mod_base = OTHER; note = 2'-O-methylcytidine-3'-phosphorothioate
  modified_base 22: mod_base = OTHER; note = 2'-deoxy-2'-fluoroadenosine-3'-phosphorothioate
  modified_base 23: mod_base = OTHER; note = 2'-O-methylcytidine
tacaagccatagtgcacccgcac

SEQ ID NO: 89 - RNA, 23 nt, synthetic construct
  source 1..23: mol_type = other RNA
  modified_base 1: mod_base = OTHER; note = 2'-O-methyladenosine-3'-phosphorothioate
  modified_base 2: mod_base = OTHER; note = 2'-deoxy-2'-fluoroguanosine-3'-phosphorothioate
  modified_base 3: mod_base = OTHER; note = 2'-O-methyladenosine-3'-phosphate
  modified_base 4: mod_base = OTHER; note = 2'-deoxy-2'-fluorocytidine-3'-phosphate
  modified_base 5: mod_base = OTHER; note = 2'-O-methyladenosine-3'-phosphate
  modified_base 6: mod_base = OTHER; note = 2'-deoxy-2'-fluoroadenosine-3'-phosphate
  modified_base 7: mod_base = OTHER; note = 2'-O-methylguanosine-3'-phosphate
  modified_base 8: mod_base = OTHER; note = 2'-deoxy-2'-fluoroadenosine-3'-phosphate
  modified_base 9: mod_base = OTHER; note = 2'-O-methyluridine-3'-phosphate
  modified_base 10: mod_base = OTHER; note = 2'-deoxy-2'-fluoroguanosine-3'-phosphate
  modified_base 11: mod_base = OTHER; note = 2'-O-methylcytidine-3'-phosphate
  modified_base 12: mod_base = OTHER; note = 2'-O-methylcytidine-3'-phosphate
  modified_base 13: mod_base = OTHER; note = 2'-O-methyladenosine-3'-phosphate
  modified_base 14: mod_base = OTHER; note = 2'-deoxy-2'-fluorocytidine-3'-phosphate
  modified_base 15: mod_base = OTHER; note = 2'-O-methylcytidine-3'-phosphate
  modified_base 16: mod_base = OTHER; note = 2'-deoxy-2'-fluorouridine-3'-phosphate
  modified_base 17: mod_base = OTHER; note = 2'-O-methylcytidine-3'-phosphate
  modified_base 18: mod_base = OTHER; note = 2'-deoxy-2'-fluorocytidine-3'-phosphate
  modified_base 19: mod_base = OTHER; note = 2'-O-methyluridine-3'-phosphate
  modified_base 20: mod_base = OTHER; note = 2'-deoxy-2'-fluoroguanosine-3'-phosphate
  modified_base 21: mod_base = OTHER; note = 2'-O-methylcytidine-3'-phosphorothioate
  modified_base 22: mod_base = OTHER; note = 2'-deoxy-2'-fluorocytidine-3'-phosphorothioate
  modified_base 23: mod_base = OTHER; note = 2'-O-methyladenosine
agacaagatgccacctcctgcca

SEQ ID NO: 90 - RNA, 23 nt, synthetic construct
  source 1..23: mol_type = other RNA
  modified_base 1: mod_base = OTHER; note = 2'-O-methyladenosine-3'-phosphorothioate
  modified_base 2: mod_base = OTHER; note = 2'-deoxy-2'-fluorocytidine-3'-phosphorothioate
  modified_base 3: mod_base = OTHER; note = 2'-O-methyluridine-3'-phosphate
  modified_base 4: mod_base = OTHER; note = 2'-deoxy-2'-fluorouridine-3'-phosphate
  modified_base 5: mod_base = OTHER; note = 2'-O-methylcytidine-3'-phosphate
  modified_base 6: mod_base = OTHER; note = 2'-deoxy-2'-fluoroguanosine-3'-phosphate
  modified_base 7: mod_base = OTHER; note = 2'-O-methyluridine-3'-phosphate
  modified_base 8: mod_base = OTHER; note = 2'-deoxy-2'-fluoroadenosine-3'-phosphate
  modified_base 9: mod_base = OTHER; note = 2'-O-methylcytidine-3'-phosphate
  modified_base 10: mod_base = OTHER; note = 2'-deoxy-2'-fluorouridine-3'-phosphate
  modified_base 11: mod_base = OTHER; note = 2'-O-methylcytidine-3'-phosphate
  modified_base 12: mod_base = OTHER; note = 2'-O-methylguanosine-3'-phosphate
  modified_base 13: mod_base = OTHER; note = 2'-O-methylguanosine-3'-phosphate
  modified_base 14: mod_base = OTHER; note = 2'-deoxy-2'-fluorocytidine-3'-phosphate
  modified_base 15: mod_base = OTHER; note = 2'-O-methylcytidine-3'-phosphate
  modified_base 16: mod_base = OTHER; note = 2'-deoxy-2'-fluorocytidine-3'-phosphate
  modified_base 17: mod_base = OTHER; note = 2'-O-methyluridine-3'-phosphate
  modified_base 18: mod_base = OTHER; note = 2'-deoxy-2'-fluoroguanosine-3'-phosphate
  modified_base 19: mod_base = OTHER; note = 2'-O-methyluridine-3'-phosphate
  modified_base 20: mod_base = OTHER; note = 2'-deoxy-2'-fluoroadenosine-3'-phosphate
  modified_base 21: mod_base = OTHER; note = 2'-O-methylguanosine-3'-phosphorothioate
  modified_base 22: mod_base = OTHER; note = 2'-deoxy-2'-fluoroguanosine-3'-phosphorothioate
  modified_base 23: mod_base = OTHER; note = 2'-O-methylguanosine
acttcgtactcggccctgtaggg

SEQ ID NO: 91 - RNA, 23 nt, synthetic construct
  source 1..23: mol_type = other RNA
  modified_base 1: mod_base = OTHER; note = 2'-O-methyladenosine-3'-phosphorothioate
  modified_base 2: mod_base = OTHER; note = 2'-deoxy-2'-fluoroguanosine-3'-phosphorothioate
  modified_base 3: mod_base = OTHER; note = 2'-O-methyladenosine-3'-phosphate
  modified_base 4: mod_base = OTHER; note = 2'-deoxy-2'-fluoroadenosine-3'-phosphate
  modified_base 5: mod_base = OTHER; note = 2'-O-methyluridine-3'-phosphate
  modified_base 6: mod_base = OTHER; note = 2'-deoxy-2'-fluoroguanosine-3'-phosphate
  modified_base 7: mod_base = OTHER; note = 2'-O-methyladenosine-3'-phosphate
  modified_base 8: mod_base = OTHER; note = 2'-deoxy-2'-fluoroadenosine-3'-phosphate
  modified_base 9: mod_base = OTHER; note = 2'-O-methylcytidine-3'-phosphate
  modified_base 10: mod_base = OTHER; note = 2'-deoxy-2'-fluorocytidine-3'-phosphate
  modified_base 11: mod_base = OTHER; note = 2'-O-methyladenosine-3'-phosphate
  modified_base 12: mod_base = OTHER; note = 2'-O-methylguanosine-3'-phosphate
  modified_base 13: mod_base = OTHER; note = 2'-O-methyladenosine-3'-phosphate
  modified_base 14: mod_base = OTHER; note = 2'-deoxy-2'-fluoroadenosine-3'-phosphate
  modified_base 15: mod_base = OTHER; note = 2'-O-methylguanosine-3'-phosphate
  modified_base 16: mod_base = OTHER; note = 2'-deoxy-2'-fluoroadenosine-3'-phosphate
  modified_base 17: mod_base = OTHER; note = 2'-O-methyladenosine-3'-phosphate
  modified_base 18: mod_base = OTHER; note = 2'-deoxy-2'-fluoroguanosine-3'-phosphate
  modified_base 19: mod_base = OTHER; note = 2'-O-methylcytidine-3'-phosphate
  modified_base 20: mod_base = OTHER; note = 2'-deoxy-2'-fluoroadenosine-3'-phosphate
  modified_base 21: mod_base = OTHER; note = 2'-O-methylguanosine-3'-phosphorothioate
  modified_base 22: mod_base = OTHER; note = 2'-deoxy-2'-fluoroguanosine-3'-phosphorothioate
  modified_base 23: mod_base = OTHER; note = 2'-O-methyluridine
agaatgaaccagaagaagcaggt

SEQ ID NO: 92 - RNA, 23 nt, synthetic construct
  source 1..23: mol_type = other RNA
  modified_base 1: mod_base = OTHER; note = 2'-O-methyladenosine-3'-phosphorothioate
  modified_base 2: mod_base = OTHER; note = 2'-deoxy-2'-fluoroguanosine-3'-phosphorothioate
  modified_base 3: mod_base = OTHER; note = 2'-O-methyluridine-3'-phosphate
  modified_base 4: mod_base = OTHER; note = 2'-deoxy-2'-fluorocytidine-3'-phosphate
  modified_base 5: mod_base = OTHER; note = 2'-O-methylcytidine-3'-phosphate
  modified_base 6: mod_base = OTHER; note = 2'-deoxy-2'-fluorouridine-3'-phosphate
  modified_base 7: mod_base = OTHER; note = 2'-O-methyluridine-3'-phosphate
  modified_base 8: mod_base = OTHER; note = 2'-deoxy-2'-fluoroguanosine-3'-phosphate
  modified_base 9: mod_base = OTHER; note = 2'-O-methyladenosine-3'-phosphate
  modified_base 10: mod_base = OTHER; note = 2'-deoxy-2'-fluorocytidine-3'-phosphate
  modified_base 11: mod_base = OTHER; note = 2'-O-methylcytidine-3'-phosphate
  modified_base 12: mod_base = OTHER; note = 2'-O-methylcytidine-3'-phosphate
  modified_base 13: mod_base = OTHER; note = 2'-O-methylcytidine-3'-phosphate
  modified_base 14: mod_base = OTHER; note = 2'-deoxy-2'-fluoroadenosine-3'-phosphate
  modified_base 15: mod_base = OTHER; note = 2'-O-methyluridine-3'-phosphate
  modified_base 16: mod_base = OTHER; note = 2'-deoxy-2'-fluorocytidine-3'-phosphate
  modified_base 17: mod_base = OTHER; note = 2'-O-methyladenosine-3'-phosphate
  modified_base 18: mod_base = OTHER; note = 2'-deoxy-2'-fluorocytidine-3'-phosphate
  modified_base 19: mod_base = OTHER; note = 2'-O-methyladenosine-3'-phosphate
  modified_base 20: mod_base = OTHER; note = 2'-deoxy-2'-fluoroguanosine-3'-phosphate
  modified_base 21: mod_base = OTHER; note = 2'-O-methylguanosine-3'-phosphorothioate
  modified_base 22: mod_base = OTHER; note = 2'-deoxy-2'-fluorocytidine-3'-phosphorothioate
  modified_base 23: mod_base = OTHER; note = 2'-O-methyladenosine
agtccttgaccccatcacaggca

SEQ ID NO: 93 - RNA, 23 nt, synthetic construct
  source 1..23: mol_type = other RNA
  modified_base 1: mod_base = OTHER; note = 2'-O-methyluridine-3'-phosphorothioate
  modified_base 2: mod_base = OTHER; note = 2'-deoxy-2'-fluoroadenosine-3'-phosphorothioate
  modified_base 3: mod_base = OTHER; note = 2'-O-methylguanosine-3'-phosphate
  modified_base 4: mod_base = OTHER; note = 2'-deoxy-2'-fluoroadenosine-3'-phosphate
  modified_base 5: mod_base = OTHER; note = 2'-O-methylcytidine-3'-phosphate
  modified_base 6: mod_base = OTHER; note = 2'-deoxy-2'-fluorocytidine-3'-phosphate
  modified_base 7: mod_base = OTHER; note = 2'-O-methyladenosine-3'-phosphate
  modified_base 8: mod_base = OTHER; note = 2'-deoxy-2'-fluoroguanosine-3'-phosphate
  modified_base 9: mod_base = OTHER; note = 2'-O-methylguanosine-3'-phosphate
  modified_base 10: mod_base = OTHER; note = 2'-deoxy-2'-fluoroguanosine-3'-phosphate
  modified_base 11: mod_base = OTHER; note = 2'-O-methylguanosine-3'-phosphate
  modified_base 12: mod_base = OTHER; note = 2'-O-methylcytidine-3'-phosphate
  modified_base 13: mod_base = OTHER; note = 2'-O-methyluridine-3'-phosphate
  modified_base 14: mod_base = OTHER; note = 2'-deoxy-2'-fluorouridine-3'-phosphate
  modified_base 15: mod_base = OTHER; note = 2'-O-methylcytidine-3'-phosphate
  modified_base 16: mod_base = OTHER; note = 2'-deoxy-2'-fluorocytidine-3'-phosphate
  modified_base 17: mod_base = OTHER; note = 2'-O-methylguanosine-3'-phosphate
  modified_base 18: mod_base = OTHER; note = 2'-deoxy-2'-fluoroadenosine-3'-phosphate
  modified_base 19: mod_base = OTHER; note = 2'-O-methyladenosine-3'-phosphate
  modified_base 20: mod_base = OTHER; note = 2'-deoxy-2'-fluoroguanosine-3'-phosphate
  modified_base 21: mod_base = OTHER; note = 2'-O-methylcytidine-3'-phosphorothioate
  modified_base 22: mod_base = OTHER; note = 2'-deoxy-2'-fluorouridine-3'-phosphorothioate
  modified_base 23: mod_base = OTHER; note = 2'-O-methylguanosine
tagaccaggggcttccgaagctg

SEQ ID NO: 94 - RNA, 23 nt, synthetic construct
  source 1..23: mol_type = other RNA
  modified_base 1: mod_base = OTHER; note = 2'-O-methylcytidine-3'-phosphorothioate
  modified_base 2: mod_base = OTHER; note = 2'-deoxy-2'-fluoroadenosine-3'-phosphorothioate
  modified_base 3: mod_base = OTHER; note = 2'-O-methylguanosine-3'-phosphate
  modified_base 4: mod_base = OTHER; note = 2'-deoxy-2'-fluoroadenosine-3'-phosphate
  modified_base 5: mod_base = OTHER; note = 2'-O-methyluridine-3'-phosphate
  modified_base 6: mod_base = OTHER; note = 2'-deoxy-2'-fluorocytidine-3'-phosphate
  modified_base 7: mod_base = OTHER; note = 2'-O-methylcytidine-3'-phosphate
  modified_base 8: mod_base = OTHER; note = 2'-deoxy-2'-fluorocytidine-3'-phosphate
  modified_base 9: mod_base = OTHER; note = 2'-O-methyladenosine-3'-phosphate
  modified_base 10: mod_base = OTHER; note = 2'-deoxy-2'-fluoroadenosine-3'-phosphate
  modified_base 11: mod_base = OTHER; note = 2'-O-methylguanosine-3'-phosphate
  modified_base 12: mod_base = OTHER; note = 2'-O-methyluridine-3'-phosphate
  modified_base 13: mod_base = OTHER; note = 2'-O-methyluridine-3'-phosphate
  modified_base 14: mod_base = OTHER; note = 2'-deoxy-2'-fluoroadenosine-3'-phosphate
  modified_base 15: mod_base = OTHER; note = 2'-O-methylguanosine-3'-phosphate
  modified_base 16: mod_base = OTHER; note = 2'-deoxy-2'-fluoroadenosine-3'-phosphate
  modified_base 17: mod_base = OTHER; note = 2'-O-methylcytidine-3'-phosphate
  modified_base 18: mod_base = OTHER; note = 2'-deoxy-2'-fluorocytidine-3'-phosphate
  modified_base 19: mod_base = OTHER; note = 2'-O-methyladenosine-3'-phosphate
  modified_base 20: mod_base = OTHER; note = 2'-deoxy-2'-fluoroguanosine-3'-phosphate
  modified_base 21: mod_base = OTHER; note = 2'-O-methylguanosine-3'-phosphorothioate
  modified_base 22: mod_base = OTHER; note = 2'-deoxy-2'-fluoroguanosine-3'-phosphorothioate
  modified_base 23: mod_base = OTHER; note = 2'-O-methylguanosine
cagatcccaagttagaccagggg

SEQ ID NO: 95 - RNA, 23 nt, synthetic construct
  source 1..23: mol_type = other RNA
  modified_base 1: mod_base = OTHER; note = 2'-O-methyluridine-3'-phosphorothioate
  modified_base 2: mod_base = OTHER; note = 2'-deoxy-2'-fluoroguanosine-3'-phosphorothioate
  modified_base 3: mod_base = OTHER; note = 2'-O-methylguanosine-3'-phosphate
  modified_base 4: mod_base = OTHER; note = 2'-deoxy-2'-fluoroadenosine-3'-phosphate
  modified_base 5: mod_base = OTHER; note = 2'-O-methylguanosine-3'-phosphate
  modified_base 6: mod_base = OTHER; note = 2'-deoxy-2'-fluoroadenosine-3'-phosphate
  modified_base 7: mod_base = OTHER; note = 2'-O-methyladenosine-3'-phosphate
  modified_base 8: mod_base = OTHER; note = 2'-deoxy-2'-fluorouridine-3'-phosphate
  modified_base 9: mod_base = OTHER; note = 2'-O-methylguanosine-3'-phosphate
  modified_base 10: mod_base = OTHER; note = 2'-deoxy-2'-fluoroadenosine-3'-phosphate
  modified_base 11: mod_base = OTHER; note = 2'-O-methyladenosine-3'-phosphate
  modified_base 12: mod_base = OTHER; note = 2'-O-methylcytidine-3'-phosphate
  modified_base 13: mod_base = OTHER; note = 2'-O-methylcytidine-3'-phosphate
  modified_base 14: mod_base = OTHER; note = 2'-deoxy-2'-fluoroadenosine-3'-phosphate
  modified_base 15: mod_base = OTHER; note = 2'-O-methylguanosine-3'-phosphate
  modified_base 16: mod_base = OTHER; note = 2'-deoxy-2'-fluoroadenosine-3'-phosphate
  modified_base 17: mod_base = OTHER; note = 2'-O-methyladenosine-3'-phosphate
  modified_base 18: mod_base = OTHER; note = 2'-deoxy-2'-fluoroguanosine-3'-phosphate
  modified_base 19: mod_base = OTHER; note = 2'-O-methyladenosine-3'-phosphate
  modified_base 20: mod_base = OTHER; note = 2'-deoxy-2'-fluoroadenosine-3'-phosphate
  modified_base 21: mod_base = OTHER; note = 2'-O-methylguanosine-3'-phosphorothioate
  modified_base 22: mod_base = OTHER; note = 2'-deoxy-2'-fluorocytidine-3'-phosphorothioate
  modified_base 23: mod_base = OTHER; note = 2'-O-methyladenosine
tggagaatgaaccagaagaagca

SEQ ID NO: 96 - RNA, 23 nt, synthetic construct
  source 1..23: mol_type = other RNA
  modified_base 1: mod_base = OTHER; note = 2'-O-methyluridine-3'-phosphorothioate
  modified_base 2: mod_base = OTHER; note = 2'-deoxy-2'-fluorouridine-3'-phosphorothioate
  modified_base 3: mod_base = OTHER; note = 2'-O-methyluridine-3'-phosphate
  modified_base 4: mod_base = OTHER; note = 2'-deoxy-2'-fluorocytidine-3'-phosphate
  modified_base 5: mod_base = OTHER; note = 2'-O-methyluridine-3'-phosphate
  modified_base 6: mod_base = OTHER; note = 2'-deoxy-2'-fluorocytidine-3'-phosphate
  modified_base 7: mod_base = OTHER; note = 2'-O-methyluridine-3'-phosphate
  modified_base 8: mod_base = OTHER; note = 2'-deoxy-2'-fluorocytidine-3'-phosphate
  modified_base 9: mod_base = OTHER; note = 2'-O-methyladenosine-3'-phosphate
  modified_base 10: mod_base = OTHER; note = 2'-deoxy-2'-fluorouridine-3'-phosphate
  modified_base 11: mod_base = OTHER; note = 2'-O-methylcytidine-3'-phosphate
  modified_base 12: mod_base = OTHER; note = 2'-O-methylcytidine-3'-phosphate
  modified_base 13: mod_base = OTHER; note = 2'-O-methyladenosine-3'-phosphate
  modified_base 14: mod_base = OTHER; note = 2'-deoxy-2'-fluoroguanosine-3'-phosphate
  modified_base 15: mod_base = OTHER; note = 2'-O-methylguanosine-3'-phosphate
  modified_base 16: mod_base = OTHER; note = 2'-deoxy-2'-fluorocytidine-3'-phosphate
  modified_base 17: mod_base = OTHER; note = 2'-O-methylcytidine-3'-phosphate
  modified_base 18: mod_base = OTHER; note = 2'-deoxy-2'-fluoroguanosine-3'-phosphate
  modified_base 19: mod_base = OTHER; note = 2'-O-methyluridine-3'-phosphate
  modified_base 20: mod_base = OTHER; note = 2'-deoxy-2'-fluorouridine-3'-phosphate
  modified_base 21: mod_base = OTHER; note = 2'-O-methylguanosine-3'-phosphorothioate
  modified_base 22: mod_base = OTHER; note = 2'-deoxy-2'-fluoroguanosine-3'-phosphorothioate
  modified_base 23: mod_base = OTHER; note = 2'-O-methylguanosine
tttctctcatccaggccgttggg

SEQ ID NO: 97 - RNA, 23 nt, synthetic construct
  source 1..23: mol_type = other RNA
  modified_base 1: mod_base = OTHER; note = 2'-O-methyluridine-3'-phosphorothioate
  modified_base 2: mod_base = OTHER; note = 2'-deoxy-2'-fluorocytidine-3'-phosphorothioate
  modified_base 3: mod_base = OTHER; note = 2'-O-methylguanosine-3'-phosphate
  modified_base 4: mod_base = OTHER; note = 2'-deoxy-2'-fluorouridine-3'-phosphate
  modified_base 5: mod_base = OTHER; note = 2'-O-methyladenosine-3'-phosphate
  modified_base 6: mod_base = OTHER; note = 2'-deoxy-2'-fluoroguanosine-3'-phosphate
  modified_base 7: mod_base = OTHER; note = 2'-O-methyluridine-3'-phosphate
  modified_base 8: mod_base = OTHER; note = 2'-deoxy-2'-fluoroadenosine-3'-phosphate
  modified_base 9: mod_base = OTHER; note = 2'-O-methylguanosine-3'-phosphate
  modified_base 10: mod_base = OTHER; note = 2'-deoxy-2'-fluorocytidine-3'-phosphate
  modified_base 11: mod_base = OTHER; note = 2'-O-methyluridine-3'-phosphate
  modified_base 12: mod_base = OTHER; note = 2'-O-methylguanosine-3'-phosphate
  modified_base 13: mod_base = OTHER; note = 2'-O-methyluridine-3'-phosphate
  modified_base 14: mod_base = OTHER; note = 2'-deoxy-2'-fluoroguanosine-3'-phosphate
  modified_base 15: mod_base = OTHER; note = 2'-O-methylcytidine-3'-phosphate
  modified_base 16: mod_base = OTHER; note = 2'-deoxy-2'-fluoroadenosine-3'-phosphate
  modified_base 17: mod_base = OTHER; note = 2'-O-methylguanosine-3'-phosphate
  modified_base 18: mod_base = OTHER; note = 2'-deoxy-2'-fluoroguanosine-3'-phosphate
  modified_base 19: mod_base = OTHER; note = 2'-O-methylcytidine-3'-phosphate
  modified_base 20: mod_base = OTHER; note = 2'-deoxy-2'-fluorocytidine-3'-phosphate
  modified_base 21: mod_base = OTHER; note = 2'-O-methylcytidine-3'-phosphorothioate
  modified_base 22: mod_base = OTHER; note = 2'-deoxy-2'-fluorouridine-3'-phosphorothioate
  modified_base 23: mod_base = OTHER; note = 2'-O-methyluridine
tcgtagtagctgtgcaggccctt

SEQ ID NO: 98 - RNA, 23 nt, synthetic construct
  source 1..23: mol_type = other RNA
  modified_base 1: mod_base = OTHER; note = 2'-O-methylcytidine-3'-phosphorothioate
  modified_base 2: mod_base = OTHER; note = 2'-deoxy-2'-fluoroadenosine-3'-phosphorothioate
  modified_base 3: mod_base = OTHER; note = 2'-O-methyluridine-3'-phosphate
  modified_base 4: mod_base = OTHER; note = 2'-deoxy-2'-fluorouridine-3'-phosphate
  modified_base 5: mod_base = OTHER; note = 2'-O-methylcytidine-3'-phosphate
  modified_base 6: mod_base = OTHER; note = 2'-deoxy-2'-fluorocytidine-3'-phosphate
  modified_base 7: mod_base = OTHER; note = 2'-O-methylcytidine-3'-phosphate
  modified_base 8: mod_base = OTHER; note = 2'-deoxy-2'-fluoroadenosine-3'-phosphate
  modified_base 9: mod_base = OTHER; note = 2'-O-methylguanosine-3'-phosphate
  modified_base 10: mod_base = OTHER; note = 2'-deoxy-2'-fluoroadenosine-3'-phosphate
  modified_base 11: mod_base = OTHER; note = 2'-O-methyluridine-3'-phosphate
  modified_base 12: mod_base = OTHER; note = 2'-O-methylcytidine-3'-phosphate
  modified_base 13: mod_base = OTHER; note = 2'-O-methylcytidine-3'-phosphate
  modified_base 14: mod_base = OTHER; note = 2'-deoxy-2'-fluorocytidine-3'-phosphate
  modified_base 15: mod_base = OTHER; note = 2'-O-methyladenosine-3'-phosphate
  modified_base 16: mod_base = OTHER; note = 2'-deoxy-2'-fluoroadenosine-3'-phosphate
  modified_base 17: mod_base = OTHER; note = 2'-O-methylguanosine-3'-phosphate
  modified_base 18: mod_base = OTHER; note = 2'-deoxy-2'-fluorouridine-3'-phosphate
  modified_base 19: mod_base = OTHER; note = 2'-O-methyluridine-3'-phosphate
  modified_base 20: mod_base = OTHER; note = 2'-deoxy-2'-fluoroadenosine-3'-phosphate
  modified_base 21: mod_base = OTHER; note = 2'-O-methylguanosine-3'-phosphorothioate
  modified_base 22: mod_base = OTHER; note = 2'-deoxy-2'-fluoroadenosine-3'-phosphorothioate
  modified_base 23: mod_base = OTHER; note = 2'-O-methylcytidine
cattcccagatcccaagttagac

SEQ ID NO: 99 - RNA, 23 nt, synthetic construct
  source 1..23: mol_type = other RNA
  modified_base 1: mod_base = OTHER; note = 2'-O-methyluridine-3'-phosphorothioate
  modified_base 2: mod_base = OTHER; note = 2'-deoxy-2'-fluorouridine-3'-phosphorothioate
  modified_base 3: mod_base = OTHER; note = 2'-O-methyladenosine-3'-phosphate
  modified_base 4: mod_base = OTHER; note = 2'-deoxy-2'-fluoroguanosine-3'-phosphate
  modified_base 5: mod_base = OTHER; note = 2'-O-methyladenosine-3'-phosphate
  modified_base 6: mod_base = OTHER; note = 2'-deoxy-2'-fluorocytidine-3'-phosphate
  modified_base 7: mod_base = OTHER; note = 2'-O-methylcytidine-3'-phosphate
  modified_base 8: mod_base = OTHER; note = 2'-deoxy-2'-fluoroadenosine-3'-phosphate
  modified_base 9: mod_base = OTHER; note = 2'-O-methylguanosine-3'-phosphate
  modified_base 10: mod_base = OTHER; note = 2'-deoxy-2'-fluoroguanosine-3'-phosphate
  modified_base 11: mod_base = OTHER; note = 2'-O-methylguanosine-3'-phosphate
  modified_base 12: mod_base = OTHER; note = 2'-O-methylguanosine-3'-phosphate
  modified_base 13: mod_base = OTHER; note = 2'-O-methylcytidine-3'-phosphate
  modified_base 14: mod_base = OTHER; note = 2'-deoxy-2'-fluorouridine-3'-phosphate
  modified_base 15: mod_base = OTHER; note = 2'-O-methyluridine-3'-phosphate
  modified_base 16: mod_base = OTHER; note = 2'-deoxy-2'-fluorocytidine-3'-phosphate
  modified_base 17: mod_base = OTHER; note = 2'-O-methylcytidine-3'-phosphate
  modified_base 18: mod_base = OTHER; note = 2'-deoxy-2'-fluoroguanosine-3'-phosphate
  modified_base 19: mod_base = OTHER; note = 2'-O-methyladenosine-3'-phosphate
  modified_base 20: mod_base = OTHER; note = 2'-deoxy-2'-fluoroadenosine-3'-phosphate
  modified_base 21: mod_base = OTHER; note = 2'-O-methylguanosine-3'-phosphorothioate
  modified_base 22: mod_base = OTHER; note = 2'-deoxy-2'-fluorocytidine-3'-phosphorothioate
  modified_base 23: mod_base = OTHER; note = 2'-O-methyluridine
ttagaccaggggcttccgaagct

SEQ ID NO: 100 - RNA, 23 nt, synthetic construct
  source 1..23: mol_type = other RNA
  modified_base 1: mod_base = OTHER; note = 2'-O-methyluridine-3'-phosphorothioate
  modified_base 2: mod_base = OTHER; note = 2'-deoxy-2'-fluoroguanosine-3'-phosphorothioate
  modified_base 3: mod_base = OTHER; note = 2'-O-methylcytidine-3'-phosphate
  modified_base 4: mod_base = OTHER; note = 2'-deoxy-2'-fluoroadenosine-3'-phosphate
  modified_base 5: mod_base = OTHER; note = 2'-O-methylguanosine-3'-phosphate
  modified_base 6: mod_base = OTHER; note = 2'-deoxy-2'-fluorocytidine-3'-phosphate
  modified_base 7: mod_base = OTHER; note = 2'-O-methyluridine-3'-phosphate
  modified_base 8: mod_base = OTHER; note = 2'-deoxy-2'-fluoroadenosine-3'-phosphate
  modified_base 9: mod_base = OTHER; note = 2'-O-methyluridine-3'-phosphate
  modified_base 10: mod_base = OTHER; note = 2'-deoxy-2'-fluoroguanosine-3'-phosphate
  modified_base 11: mod_base = OTHER; note = 2'-O-methyluridine-3'-phosphate
  modified_base 12: mod_base = OTHER; note = 2'-O-methylcytidine-3'-phosphate
  modified_base 13: mod_base = OTHER; note = 2'-O-methyluridine-3'-phosphate
  modified_base 14: mod_base = OTHER; note = 2'-deoxy-2'-fluorouridine-3'-phosphate
  modified_base 15: mod_base = OTHER; note = 2'-O-methyluridine-3'-phosphate
  modified_base 16: mod_base = OTHER; note = 2'-deoxy-2'-fluorocytidine-3'-phosphate
  modified_base 17: mod_base = OTHER; note = 2'-O-methyladenosine-3'-phosphate
  modified_base 18: mod_base = OTHER; note = 2'-deoxy-2'-fluorocytidine-3'-phosphate
  modified_base 19: mod_base = OTHER; note = 2'-O-methyladenosine-3'-phosphate
  modified_base 20: mod_base = OTHER; note = 2'-deoxy-2'-fluorocytidine-3'-phosphate
  modified_base 21: mod_base = OTHER; note = 2'-O-methyluridine-3'-phosphorothioate
  modified_base 22: mod_base = OTHER; note = 2'-deoxy-2'-fluoroguanosine-3'-phosphorothioate
  modified_base 23: mod_base = OTHER; note = 2'-O-methylguanosine
tgcagctatgtctttcacactgg

SEQ ID NO: 101 - RNA, 23 nt, synthetic construct
  source 1..23: mol_type = other RNA
  modified_base 1: mod_base = OTHER; note = 2'-O-methyladenosine-3'-phosphorothioate
  modified_base 2: mod_base = OTHER; note = 2'-deoxy-2'-fluoroguanosine-3'-phosphorothioate
  modified_base 3: mod_base = OTHER; note = 2'-O-methyladenosine-3'-phosphate
  modified_base 4: mod_base = OTHER; note = 2'-deoxy-2'-fluorouridine-3'-phosphate
  modified_base 5: mod_base = OTHER; note = 2'-O-methylguanosine-3'-phosphate
  modified_base 6: mod_base = OTHER; note = 2'-deoxy-2'-fluorouridine-3'-phosphate
  modified_base 7: mod_base = OTHER; note = 2'-O-methylguanosine-3'-phosphate
  modified_base 8: mod_base = OTHER; note = 2'-deoxy-2'-fluorouridine-3'-phosphate
  modified_base 9: mod_base = OTHER; note = 2'-O-methylcytidine-3'-phosphate
  modified_base 10: mod_base = OTHER; note = 2'-deoxy-2'-fluoroguanosine-3'-phosphate
  modified_base 11: mod_base = OTHER; note = 2'-O-methyladenosine-3'-phosphate
  modified_base 12: mod_base = OTHER; note = 2'-O-methylcytidine-3'-phosphate
  modified_base 13: mod_base = OTHER; note = 2'-O-methylcytidine-3'-phosphate
  modified_base 14: mod_base = OTHER; note = 2'-deoxy-2'-fluorocytidine-3'-phosphate
  modified_base 15: mod_base = OTHER; note = 2'-O-methylcytidine-3'-phosphate
  modified_base 16: mod_base = OTHER; note = 2'-deoxy-2'-fluoroguanosine-3'-phosphate
  modified_base 17: mod_base = OTHER; note = 2'-O-methyladenosine-3'-phosphate
  modified_base 18: mod_base = OTHER; note = 2'-deoxy-2'-fluoroadenosine-3'-phosphate
  modified_base 19: mod_base = OTHER; note = 2'-O-methylcytidine-3'-phosphate
  modified_base 20: mod_base = OTHER; note = 2'-deoxy-2'-fluorocytidine-3'-phosphate
  modified_base 21: mod_base = OTHER; note = 2'-O-methyluridine-3'-phosphorothioate
  modified_base 22: mod_base = OTHER; note = 2'-deoxy-2'-fluoroguanosine-3'-phosphorothioate
  modified_base 23: mod_base = OTHER; note = 2'-O-methylguanosine
agatgtgtcgaccccgaacctgg

SEQ ID NO: 102 - RNA, 23 nt, synthetic construct
  source 1..23: mol_type = other RNA
  modified_base 1: mod_base = OTHER; note = 2'-O-methyluridine-3'-phosphorothioate
  modified_base 2: mod_base = OTHER; note = 2'-deoxy-2'-fluoroadenosine-3'-phosphorothioate
  modified_base 3: mod_base = OTHER; note = 2'-O-methylguanosine-3'-phosphate
  modified_base 4: mod_base = OTHER; note = 2'-deoxy-2'-fluorocytidine-3'-phosphate
  modified_base 5: mod_base = OTHER; note = 2'-O-methylguanosine-3'-phosphate
  modified_base 6: mod_base = OTHER; note = 2'-deoxy-2'-fluoroguanosine-3'-phosphate
  modified_base 7: mod_base = OTHER; note = 2'-O-methyluridine-3'-phosphate
  modified_base 8: mod_base = OTHER; note = 2'-deoxy-2'-fluoroadenosine-3'-phosphate
  modified_base 9: mod_base = OTHER; note = 2'-O-methyladenosine-3'-phosphate
  modified_base 10: mod_base = OTHER; note = 2'-deoxy-2'-fluorocytidine-3'-phosphate
  modified_base 11: mod_base = OTHER; note = 2'-O-methyladenosine-3'-phosphate
  modified_base 12: mod_base = OTHER; note = 2'-O-methyladenosine-3'-phosphate
  modified_base 13: mod_base = OTHER; note = 2'-O-methylcytidine-3'-phosphate
  modified_base 14: mod_base = OTHER; note = 2'-deoxy-2'-fluorocytidine-3'-phosphate
  modified_base 15: mod_base = OTHER; note = 2'-O-methylcytidine-3'-phosphate
  modified_base 16: mod_base = OTHER; note = 2'-deoxy-2'-fluoroadenosine-3'-phosphate
  modified_base 17: mod_base = OTHER; note = 2'-O-methylguanosine-3'-phosphate
  modified_base 18: mod_base = OTHER; note = 2'-deoxy-2'-fluorocytidine-3'-phosphate
  modified_base 19: mod_base = OTHER; note = 2'-O-methylguanosine-3'-phosphate
  modified_base 20: mod_base = OTHER; note = 2'-deoxy-2'-fluorouridine-3'-phosphate
  modified_base 21: mod_base = OTHER; note = 2'-O-methylguanosine-3'-phosphorothioate
  modified_base 22: mod_base = OTHER; note = 2'-deoxy-2'-fluoroguanosine-3'-phosphorothioate
  modified_base 23: mod_base = OTHER; note = 2'-O-methyladenosine
tagcggtaacaacccagcgtgga

SEQ ID NO: 103 - RNA, 23 nt, synthetic construct
  source 1..23: mol_type = other RNA
  modified_base 1: mod_base = OTHER; note = 2'-O-methyladenosine-3'-phosphorothioate
  modified_base 2: mod_base = OTHER; note = 2'-deoxy-2'-fluoroadenosine-3'-phosphorothioate
  modified_base 3: mod_base = OTHER; note = 2'-O-methyluridine-3'-phosphate
  modified_base 4: mod_base = OTHER; note = 2'-deoxy-2'-fluoroadenosine-3'-phosphate
  modified_base 5: mod_base = OTHER; note = 2'-O-methylcytidine-3'-phosphate
  modified_base 6: mod_base = OTHER; note = 2'-deoxy-2'-fluorouridine-3'-phosphate
  modified_base 7: mod_base = OTHER; note = 2'-O-methyluridine-3'-phosphate
  modified_base 8: mod_base = OTHER; note = 2'-deoxy-2'-fluoroguanosine-3'-phosphate
  modified_base 9: mod_base = OTHER; note = 2'-O-methyluridine-3'-phosphate
  modified_base 10: mod_base = OTHER; note = 2'-deoxy-2'-fluorocytidine-3'-phosphate
  modified_base 11: mod_base = OTHER; note = 2'-O-methylcytidine-3'-phosphate
  modified_base 12: mod_base = OTHER; note = 2'-O-methylcytidine-3'-phosphate
  modified_base 13: mod_base = OTHER; note = 2'-O-methylcytidine-3'-phosphate
  modified_base 14: mod_base = OTHER; note = 2'-deoxy-2'-fluorocytidine-3'-phosphate
  modified_base 15: mod_base = OTHER; note = 2'-O-methyluridine-3'-phosphate
  modified_base 16: mod_base = OTHER; note = 2'-deoxy-2'-fluoroguanosine-3'-phosphate
  modified_base 17: mod_base = OTHER; note = 2'-O-methylcytidine-3'-phosphate
  modified_base 18: mod_base = OTHER; note = 2'-deoxy-2'-fluorouridine-3'-phosphate
  modified_base 19: mod_base = OTHER; note = 2'-O-methyluridine-3'-phosphate
  modified_base 20: mod_base = OTHER; note = 2'-deoxy-2'-fluoroguanosine-3'-phosphate
  modified_base 21: mod_base = OTHER; note = 2'-O-methylguanosine-3'-phosphorothioate
  modified_base 22: mod_base = OTHER; note = 2'-deoxy-2'-fluorocytidine-3'-phosphorothioate
  modified_base 23: mod_base = OTHER; note = 2'-O-methyladenosine
aatacttgtccccctgcttggca

SEQ ID NO: 104 - RNA, 23 nt, synthetic construct
  source 1..23: mol_type = other RNA
  modified_base 1: mod_base = OTHER; note = 2'-O-methylcytidine-3'-phosphorothioate
  modified_base 2: mod_base = OTHER; note = 2'-deoxy-2'-fluorocytidine-3'-phosphorothioate
  modified_base 3: mod_base = OTHER; note = 2'-O-methyladenosine-3'-phosphate
  modified_base 4: mod_base = OTHER; note = 2'-deoxy-2'-fluorocytidine-3'-phosphate
  modified_base 5: mod_base = OTHER; note = 2'-O-methyladenosine-3'-phosphate
  modified_base 6: mod_base = OTHER; note = 2'-deoxy-2'-fluorocytidine-3'-phosphate
  modified_base 7: mod_base = OTHER; note = 2'-O-methyladenosine-3'-phosphate
  modified_base 8: mod_base = OTHER; note = 2'-deoxy-2'-fluoroguanosine-3'-phosphate
  modified_base 9: mod_base = OTHER; note = 2'-O-methylcytidine-3'-phosphate
  modified_base 10: mod_base = OTHER; note = 2'-deoxy-2'-fluorocytidine-3'-phosphate
  modified_base 11: mod_base = OTHER; note = 2'-O-methyluridine-3'-phosphate
  modified_base 12: mod_base = OTHER; note = 2'-O-methylcytidine-3'-phosphate
  modified_base 13: mod_base = OTHER; note = 2'-O-methylcytidine-3'-phosphate
  modified_base 14: mod_base = OTHER; note = 2'-deoxy-2'-fluorouridine-3'-phosphate
  modified_base 15: mod_base = OTHER; note = 2'-O-methylguanosine-3'-phosphate
  modified_base 16: mod_base = OTHER; note = 2'-deoxy-2'-fluorouridine-3'-phosphate
  modified_base 17: mod_base = OTHER; note = 2'-O-methyluridine-3'-phosphate
  modified_base 18: mod_base = OTHER; note = 2'-deoxy-2'-fluorocytidine-3'-phosphate
  modified_base 19: mod_base = OTHER; note = 2'-O-methyluridine-3'-phosphate
  modified_base 20: mod_base = OTHER; note = 2'-deoxy-2'-fluoroguanosine-3'-phosphate
  modified_base 21: mod_base = OTHER; note = 2'-O-methylguanosine-3'-phosphorothioate
  modified_base 22: mod_base = OTHER; note = 2'-deoxy-2'-fluoroadenosine-3'-phosphorothioate
  modified_base 23: mod_base = OTHER; note = 2'-O-methyluridine
ccacacagcctcctgttctggat

SEQ ID NO: 105 - RNA, 23 nt, synthetic construct
  source 1..23: mol_type = other RNA
  modified_base 1: mod_base = OTHER; note = 2'-O-methylguanosine-3'-phosphorothioate
  modified_base 2: mod_base = OTHER; note = 2'-deoxy-2'-fluorouridine-3'-phosphorothioate
  modified_base 3: mod_base = OTHER; note = 2'-O-methylguanosine-3'-phosphate
  modified_base 4: mod_base = OTHER; note = 2'-deoxy-2'-fluoroadenosine-3'-phosphate
  modified_base 5: mod_base = OTHER; note = 2'-O-methylguanosine-3'-phosphate
  modified_base 6: mod_base = OTHER; note = 2'-deoxy-2'-fluoroguanosine-3'-phosphate
  modified_base 7: mod_base = OTHER; note = 2'-O-methylguanosine-3'-phosphate
  modified_base 8: mod_base = OTHER; note = 2'-deoxy-2'-fluoroadenosine-3'-phosphate
  modified_base 9: mod_base = OTHER; note = 2'-O-methylguanosine-3'-phosphate
  modified_base 10: mod_base = OTHER; note = 2'-deoxy-2'-fluoroadenosine-3'-phosphate
  modified_base 11: mod_base = OTHER; note = 2'-O-methyluridine-3'-phosphate
  modified_base 12: mod_base = OTHER; note = 2'-O-methylcytidine-3'-phosphate
  modified_base 13: mod_base = OTHER; note = 2'-O-methyluridine-3'-phosphate
  modified_base 14: mod_base = OTHER; note = 2'-deoxy-2'-fluoroguanosine-3'-phosphate
  modified_base 15: mod_base = OTHER; note = 2'-O-methylguanosine-3'-phosphate
  modified_base 16: mod_base = OTHER; note = 2'-deoxy-2'-fluoroguanosine-3'-phosphate
  modified_base 17: mod_base = OTHER; note = 2'-O-methyladenosine-3'-phosphate
  modified_base 18: mod_base = OTHER; note = 2'-deoxy-2'-fluoroguanosine-3'-phosphate
  modified_base 19: mod_base = OTHER; note = 2'-O-methylguanosine-3'-phosphate
  modified_base 20: mod_base = OTHER; note = 2'-deoxy-2'-fluorouridine-3'-phosphate
  modified_base 21: mod_base = OTHER; note = 2'-O-methylguanosine-3'-phosphorothioate
  modified_base 22: mod_base = OTHER; note = 2'-deoxy-2'-fluoroadenosine-3'-phosphorothioate
  modified_base 23: mod_base = OTHER; note = 2'-O-methyladenosine
gtgagggagatctgggaggtgaa

SEQ ID NO: 106 - RNA, 23 nt, synthetic construct
  source 1..23: mol_type = other RNA
  modified_base 1: mod_base = OTHER; note = 2'-O-methylcytidine-3'-phosphorothioate
  modified_base 2: mod_base = OTHER; note = 2'-deoxy-2'-fluorocytidine-3'-phosphorothioate
  modified_base 3: mod_base = OTHER; note = 2'-O-methyladenosine-3'-phosphate
  modified_base 4: mod_base = OTHER; note = 2'-deoxy-2'-fluorouridine-3'-phosphate
  modified_base 5: mod_base = OTHER; note = 2'-O-methylguanosine-3'-phosphate
  modified_base 6: mod_base = OTHER; note = 2'-deoxy-2'-fluoroguanosine-3'-phosphate
  modified_base 7: mod_base = OTHER; note = 2'-O-methylcytidine-3'-phosphate
  modified_base 8: mod_base = OTHER; note = 2'-deoxy-2'-fluorocytidine-3'-phosphate
  modified_base 9: mod_base = OTHER; note = 2'-O-methyladenosine-3'-phosphate
  modified_base 10: mod_base = OTHER; note = 2'-deoxy-2'-fluorocytidine-3'-phosphate
  modified_base 11: mod_base = OTHER; note = 2'-O-methyluridine-3'-phosphate
  modified_base 12: mod_base = OTHER; note = 2'-O-methylcytidine-3'-phosphate
  modified_base 13: mod_base = OTHER; note = 2'-O-methyladenosine-3'-phosphate
  modified_base 14: mod_base = OTHER; note = 2'-deoxy-2'-fluorocytidine-3'-phosphate
  modified_base 15: mod_base = OTHER; note = 2'-O-methylcytidine-3'-phosphate
  modified_base 16: mod_base = OTHER; note = 2'-deoxy-2'-fluorocytidine-3'-phosphate
  modified_base 17: mod_base = OTHER; note = 2'-O-methyluridine-3'-phosphate
  modified_base 18: mod_base = OTHER; note = 2'-deoxy-2'-fluorocytidine-3'-phosphate
  modified_base 19: mod_base = OTHER; note = 2'-O-methylguanosine-3'-phosphate
  modified_base 20: mod_base = OTHER; note = 2'-deoxy-2'-fluoroguanosine-3'-phosphate
  modified_base 21: mod_base = OTHER; note = 2'-O-methyladenosine-3'-phosphorothioate
  modified_base 22: mod_base = OTHER; note = 2'-deoxy-2'-fluoroguanosine-3'-phosphorothioate
  modified_base 23: mod_base = OTHER; note = 2'-O-methylguanosine
ccatggccactcaccctcggagg

SEQ ID NO: 107 - RNA, 23 nt, synthetic construct
  source 1..23: mol_type = other RNA
  modified_base 1: mod_base = OTHER; note = 2'-O-methylguanosine-3'-phosphorothioate
  modified_base 2: mod_base = OTHER; note = 2'-deoxy-2'-fluorocytidine-3'-phosphorothioate
  modified_base 3: mod_base = OTHER; note = 2'-O-methylcytidine-3'-phosphate
  modified_base 4: mod_base = OTHER; note = 2'-deoxy-2'-fluoroadenosine-3'-phosphate
  modified_base 5: mod_base = OTHER; note = 2'-O-methylcytidine-3'-phosphate
  modified_base 6: mod_base = OTHER; note = 2'-deoxy-2'-fluoroadenosine-3'-phosphate
  modified_base 7: mod_base = OTHER; note = 2'-O-methylcytidine-3'-phosphate
  modified_base 8: mod_base = OTHER; note = 2'-deoxy-2'-fluoroadenosine-3'-phosphate
  modified_base 9: mod_base = OTHER; note = 2'-O-methylguanosine-3'-phosphate
  modified_base 10: mod_base = OTHER; note = 2'-deoxy-2'-fluorocytidine-3'-phosphate
  modified_base 11: mod_base = OTHER; note = 2'-O-methylcytidine-3'-phosphate
  modified_base 12: mod_base = OTHER; note = 2'-O-methyluridine-3'-phosphate
  modified_base 13: mod_base = OTHER; note = 2'-O-methylcytidine-3'-phosphate
  modified_base 14: mod_base = OTHER; note = 2'-deoxy-2'-fluorocytidine-3'-phosphate
  modified_base 15: mod_base = OTHER; note = 2'-O-methyluridine-3'-phosphate
  modified_base 16: mod_base = OTHER; note = 2'-deoxy-2'-fluoroguanosine-3'-phosphate
  modified_base 17: mod_base = OTHER; note = 2'-O-methyluridine-3'-phosphate
  modified_base 18: mod_base = OTHER; note = 2'-deoxy-2'-fluorouridine-3'-phosphate
  modified_base 19: mod_base = OTHER; note = 2'-O-methylcytidine-3'-phosphate
  modified_base 20: mod_base = OTHER; note = 2'-deoxy-2'-fluorouridine-3'-phosphate
  modified_base 21: mod_base = OTHER; note = 2'-O-methylguanosine-3'-phosphorothioate
  modified_base 22: mod_base = OTHER; note = 2'-deoxy-2'-fluoroguanosine-3'-phosphorothioate
  modified_base 23: mod_base = OTHER; note = 2'-O-methyladenosine
gccacacagcctcctgttctgga

SEQ ID NO: 108 - RNA, 23 nt, synthetic construct
  source 1..23: mol_type = other RNA
  modified_base 1: mod_base = OTHER; note = 2'-O-methylguanosine-3'-phosphorothioate
  modified_base 2: mod_base = OTHER; note = 2'-deoxy-2'-fluoroguanosine-3'-phosphorothioate
  modified_base 3: mod_base = OTHER; note = 2'-O-methylcytidine-3'-phosphate
  modified_base 4: mod_base = OTHER; note = 2'-deoxy-2'-fluorocytidine-3'-phosphate
  modified_base 5: mod_base = OTHER; note = 2'-O-methyladenosine-3'-phosphate
  modified_base 6: mod_base = OTHER; note = 2'-deoxy-2'-fluorocytidine-3'-phosphate
  modified_base 7: mod_base = OTHER; note = 2'-O-methyluridine-3'-phosphate
  modified_base 8: mod_base = OTHER; note = 2'-deoxy-2'-fluorocytidine-3'-phosphate
  modified_base 9: mod_base = OTHER; note = 2'-O-methyladenosine-3'-phosphate
  modified_base 10: mod_base = OTHER; note = 2'-deoxy-2'-fluorocytidine-3'-phosphate
  modified_base 11: mod_base = OTHER; note = 2'-O-methylcytidine-3'-phosphate
  modified_base 12: mod_base = OTHER; note = 2'-O-methylcytidine-3'-phosphate
  modified_base 13: mod_base = OTHER; note = 2'-O-methyluridine-3'-phosphate
  modified_base 14: mod_base = OTHER; note = 2'-deoxy-2'-fluorocytidine-3'-phosphate
  modified_base 15: mod_base = OTHER; note = 2'-O-methylguanosine-3'-phosphate
  modified_base 16: mod_base = OTHER; note = 2'-deoxy-2'-fluoroguanosine-3'-phosphate
  modified_base 17: mod_base = OTHER; note = 2'-O-methyladenosine-3'-phosphate
  modified_base 18: mod_base = OTHER; note = 2'-deoxy-2'-fluoroguanosine-3'-phosphate
  modified_base 19: mod_base = OTHER; note = 2'-O-methylguanosine-3'-phosphate
  modified_base 20: mod_base = OTHER; note = 2'-deoxy-2'-fluoroadenosine-3'-phosphate
  modified_base 21: mod_base = OTHER; note = 2'-O-methylcytidine-3'-phosphorothioate
  modified_base 22: mod_base = OTHER; note = 2'-deoxy-2'-fluoroadenosine-3'-phosphorothioate
  modified_base 23: mod_base = OTHER; note = 2'-O-methylcytidine
ggccactcaccctcggaggacac

SEQ ID NO: 109 - RNA, 23 nt, synthetic construct
  source 1..23: mol_type = other RNA
  modified_base 1: mod_base = OTHER; note = 2'-O-methylcytidine-3'-phosphorothioate
  modified_base 2: mod_base = OTHER; note = 2'-deoxy-2'-fluorocytidine-3'-phosphorothioate
  modified_base 3: mod_base = OTHER; note = 2'-O-methylcytidine-3'-phosphate
  modified_base 4: mod_base = OTHER; note = 2'-deoxy-2'-fluoroadenosine-3'-phosphate
  modified_base 5: mod_base = OTHER; note = 2'-O-methylcytidine-3'-phosphate
  modified_base 6: mod_base = OTHER; note = 2'-deoxy-2'-fluoroadenosine-3'-phosphate
  modified_base 7: mod_base = OTHER; note = 2'-O-methylguanosine-3'-phosphate
  modified_base 8: mod_base = OTHER; note = 2'-deoxy-2'-fluoroadenosine-3'-phosphate
  modified_base 9: mod_base = OTHER; note = 2'-O-methyluridine-3'-phosphate
  modified_base 10: mod_base = OTHER; note = 2'-deoxy-2'-fluoroguanosine-3'-phosphate
  modified_base 11: mod_base = OTHER; note = 2'-O-methyluridine-3'-phosphate
  modified_base 12: mod_base = OTHER; note = 2'-O-methylguanosine-3'-phosphate
  modified_base 13: mod_base = OTHER; note = 2'-O-methyluridine-3'-phosphate
  modified_base 14: mod_base = OTHER; note = 2'-deoxy-2'-fluorocytidine-3'-phosphate
  modified_base 15: mod_base = OTHER; note = 2'-O-methylguanosine-3'-phosphate
  modified_base 16: mod_base = OTHER; note = 2'-deoxy-2'-fluoroadenosine-3'-phosphate
  modified_base 17: mod_base = OTHER; note = 2'-O-methylcytidine-3'-phosphate
  modified_base 18: mod_base = OTHER; note = 2'-deoxy-2'-fluorocytidine-3'-phosphate
  modified_base 19: mod_base = OTHER; note = 2'-O-methylcytidine-3'-phosphate
  modified_base 20: mod_base = OTHER; note = 2'-deoxy-2'-fluorocytidine-3'-phosphate
  modified_base 21: mod_base = OTHER; note = 2'-O-methylguanosine-3'-phosphorothioate
  modified_base 22: mod_base = OTHER; note = 2'-deoxy-2'-fluoroadenosine-3'-phosphorothioate
  modified_base 23: mod_base = OTHER; note = 2'-O-methyladenosine
cccacagatgtgtcgaccccgaa

SEQ ID NO: 110 - RNA, 23 nt, synthetic construct
  source 1..23: mol_type = other RNA
  modified_base 1: mod_base = OTHER; note = 2'-O-methylcytidine-3'-phosphorothioate
  modified_base 2: mod_base = OTHER; note = 2'-deoxy-2'-fluorocytidine-3'-phosphorothioate
  modified_base 3: mod_base = OTHER; note = 2'-O-methylcytidine-3'-phosphate
  modified_base 4: mod_base = OTHER; note = 2'-deoxy-2'-fluorocytidine-3'-phosphate
  modified_base 5: mod_base = OTHER; note = 2'-O-methyladenosine-3'-phosphate
  modified_base 6: mod_base = OTHER; note = 2'-deoxy-2'-fluorocytidine-3'-phosphate
  modified_base 7: mod_base = OTHER; note = 2'-O-methyladenosine-3'-phosphate
  modified_base 8: mod_base = OTHER; note = 2'-deoxy-2'-fluoroguanosine-3'-phosphate
  modified_base 9: mod_base = OTHER; note = 2'-O-methyladenosine-3'-phosphate
  modified_base 10: mod_base = OTHER; note = 2'-deoxy-2'-fluorouridine-3'-phosphate
  modified_base 11: mod_base = OTHER; note = 2'-O-methylguanosine-3'-phosphate
  modified_base 12: mod_base = OTHER; note = 2'-O-methyluridine-3'-phosphate
  modified_base 13: mod_base = OTHER; note = 2'-O-methylguanosine-3'-phosphate
  modified_base 14: mod_base = OTHER; note = 2'-deoxy-2'-fluorouridine-3'-phosphate
  modified_base 15: mod_base = OTHER; note = 2'-O-methylcytidine-3'-phosphate
  modified_base 16: mod_base = OTHER; note = 2'-deoxy-2'-fluoroguanosine-3'-phosphate
  modified_base 17: mod_base = OTHER; note = 2'-O-methyladenosine-3'-phosphate
  modified_base 18: mod_base = OTHER; note = 2'-deoxy-2'-fluorocytidine-3'-phosphate
  modified_base 19: mod_base = OTHER; note = 2'-O-methylcytidine-3'-phosphate
  modified_base 20: mod_base = OTHER; note = 2'-deoxy-2'-fluorocytidine-3'-phosphate
  modified_base 21: mod_base = OTHER; note = 2'-O-methylcytidine-3'-phosphorothioate
  modified_base 22: mod_base = OTHER; note = 2'-deoxy-2'-fluoroguanosine-3'-phosphorothioate
  modified_base 23: mod_base = OTHER; note = 2'-O-methyladenosine
ccccacagatgtgtcgaccccga

SEQ ID NO: 111 - RNA, 23 nt, synthetic construct
  source 1..23: mol_type = other RNA
  modified_base 1: mod_base = OTHER; note = 2'-O-methylguanosine-3'-phosphorothioate
  modified_base 2: mod_base = OTHER; note = 2'-deoxy-2'-fluorocytidine-3'-phosphorothioate
  modified_base 3: mod_base = OTHER; note = 2'-O-methylcytidine-3'-phosphate
  modified_base 4: mod_base = OTHER; note = 2'-deoxy-2'-fluoroadenosine-3'-phosphate
  modified_base 5: mod_base = OTHER; note = 2'-O-methyluridine-3'-phosphate
  modified_base 6: mod_base = OTHER; note = 2'-deoxy-2'-fluoroguanosine-3'-phosphate
  modified_base 7: mod_base = OTHER; note = 2'-O-methylcytidine-3'-phosphate
  modified_base 8: mod_base = OTHER; note = 2'-deoxy-2'-fluorouridine-3'-phosphate
  modified_base 9: mod_base = OTHER; note = 2'-O-methylguanosine-3'-phosphate
  modified_base 10: mod_base = OTHER; note = 2'-deoxy-2'-fluorouridine-3'-phosphate
  modified_base 11: mod_base = OTHER; note = 2'-O-methylcytidine-3'-phosphate
  modified_base 12: mod_base = OTHER; note = 2'-O-methylcytidine-3'-phosphate
  modified_base 13: mod_base = OTHER; note = 2'-O-methyluridine-3'-phosphate
  modified_base 14: mod_base = OTHER; note = 2'-deoxy-2'-fluorocytidine-3'-phosphate
  modified_base 15: mod_base = OTHER; note = 2'-O-methylcytidine-3'-phosphate
  modified_base 16: mod_base = OTHER; note = 2'-deoxy-2'-fluorouridine-3'-phosphate
  modified_base 17: mod_base = OTHER; note = 2'-O-methylguanosine-3'-phosphate
  modified_base 18: mod_base = OTHER; note = 2'-deoxy-2'-fluoroguanosine-3'-phosphate
  modified_base 19: mod_base = OTHER; note = 2'-O-methyladenosine-3'-phosphate
  modified_base 20: mod_base = OTHER; note = 2'-deoxy-2'-fluoroadenosine-3'-phosphate
  modified_base 21: mod_base = OTHER; note = 2'-O-methylguanosine-3'-phosphorothioate
  modified_base 22: mod_base = OTHER; note = 2'-deoxy-2'-fluorocytidine-3'-phosphorothioate
  modified_base 23: mod_base = OTHER; note = 2'-O-methyladenosine
gccatgctgtcctcctggaagca

SEQ ID NO: 112 - RNA, 23 nt, synthetic construct
  source 1..23: mol_type = other RNA
  modified_base 1: mod_base = OTHER; note = 2'-O-methyluridine-3'-phosphorothioate
  modified_base 2: mod_base = OTHER; note = 2'-deoxy-2'-fluoroguanosine-3'-phosphorothioate
  modified_base 3: mod_base = OTHER; note = 2'-O-methyluridine-3'-phosphate
  modified_base 4: mod_base = OTHER; note = 2'-deoxy-2'-fluoroadenosine-3'-phosphate
  modified_base 5: mod_base = OTHER; note = 2'-O-methylcytidine-3'-phosphate
  modified_base 6: mod_base = OTHER; note = 2'-deoxy-2'-fluorocytidine-3'-phosphate
  modified_base 7: mod_base = OTHER; note = 2'-O-methylcytidine-3'-phosphate
  modified_base 8: mod_base = OTHER; note = 2'-deoxy-2'-fluorouridine-3'-phosphate
  modified_base 9: mod_base = OTHER; note = 2'-O-methyladenosine-3'-phosphate
  modified_base 10: mod_base = OTHER; note = 2'-deoxy-2'-fluoroguanosine-3'-phosphate
  modified_base 11: mod_base = OTHER; note = 2'-O-methylguanosine-3'-phosphate
  modified_base 12: mod_base = OTHER; note = 2'-O-methyladenosine-3'-phosphate
  modified_base 13: mod_base = OTHER; note = 2'-O-methyladenosine-3'-phosphate
  modified_base 14: mod_base = OTHER; note = 2'-deoxy-2'-fluoroadenosine-3'-phosphate
  modified_base 15: mod_base = OTHER; note = 2'-O-methyluridine-3'-phosphate
  modified_base 16: mod_base = OTHER; note = 2'-deoxy-2'-fluoroadenosine-3'-phosphate
  modified_base 17: mod_base = OTHER; note = 2'-O-methylcytidine-3'-phosphate
  modified_base 18: mod_base = OTHER; note = 2'-deoxy-2'-fluorocytidine-3'-phosphate
  modified_base 19: mod_base = OTHER; note = 2'-O-methyladenosine-3'-phosphate
  modified_base 20: mod_base = OTHER; note = 2'-deoxy-2'-fluoroguanosine-3'-phosphate
  modified_base 21: mod_base = OTHER; note = 2'-O-methyladenosine-3'-phosphorothioate
  modified_base 22: mod_base = OTHER; note = 2'-O-methylguanosine-3'-phosphorothioate
  modified_base 23: mod_base = OTHER; note = 2'-O-methyluridine
tgtaccctaggaaataccagagt

SEQ ID NO: 113 - RNA, 21 nt, synthetic construct
  source 1..21: mol_type = other RNA
tggcctggagaggtgtccttc

SEQ ID NO: 114 - RNA, 21 nt, synthetic construct
  source 1..21: mol_type = other RNA
ggggtgctactctggtatttc

SEQ ID NO: 115 - RNA, 21 nt, synthetic construct
  source 1..21: mol_type = other RNA
caacggcctggatgagagaaa

SEQ ID NO: 116 - RNA, 21 nt, synthetic construct
  source 1..21: mol_type = other RNA
atcgccacttctcccaggatc

SEQ ID NO: 117 - RNA, 21 nt, synthetic construct
  source 1..21: mol_type = other RNA
ggtggcaggaggtggcatctt

SEQ ID NO: 118 - RNA, 21 nt, synthetic construct
  source 1..21: mol_type = other RNA
gaccgactggccatgtatgac

SEQ ID NO: 119 - RNA, 21 nt, synthetic construct
  source 1..21: mol_type = other RNA
ggtgtgcgggtgcactatggc

SEQ ID NO: 120 - RNA, 21 nt, synthetic construct
  source 1..21: mol_type = other RNA
ggcctggatgagagaaactgc

SEQ ID NO: 121 - RNA, 21 nt, synthetic construct
  source 1..21: mol_type = other RNA
ctctggtatttcctagggtac

SEQ ID NO: 122 - RNA, 21 nt, synthetic construct
  source 1..21: mol_type = other RNA
gcccctggtctaacttgggat

SEQ ID NO: 123 - RNA, 21 nt, synthetic construct
  source 1..21: mol_type = other RNA
gaggcagaagtatgatttgcc

SEQ ID NO: 124 - RNA, 21 nt, synthetic construct
  source 1..21: mol_type = other RNA
aagccagtgtgaaagacatag

SEQ ID NO: 125 - RNA, 21 nt, synthetic construct
  source 1..21: mol_type = other RNA
gccgggaccgactggccatgt

SEQ ID NO: 126 - RNA, 21 nt, synthetic construct
  source 1..21: mol_type = other RNA
ctccaggttcggggtcgacac

SEQ ID NO: 127 - RNA, 21 nt, synthetic construct
  source 1..21: mol_type = other RNA
agcccctggtctaacttggga

SEQ ID NO: 128 - RNA, 21 nt, synthetic construct
  source 1..21: mol_type = other RNA
tcgccacttctcccaggatct

SEQ ID NO: 129 - RNA, 21 nt, synthetic construct
  source 1..21: mol_type = other RNA
actctggtatttcctagggta

SEQ ID NO: 130 - RNA, 21 nt, synthetic construct
  source 1..21: mol_type = other RNA
tcgctgaccgctgggtgataa

SEQ ID NO: 131 - RNA, 21 nt, synthetic construct
  source 1..21: mol_type = other RNA
gccccaacggcctggatgaga

SEQ ID NO: 132 - RNA, 21 nt, synthetic construct
  source 1..21: mol_type = other RNA
gccaagcagggggacaagtat

SEQ ID NO: 133 - RNA, 21 nt, synthetic construct
  source 1..21: mol_type = other RNA
tcccctacagggccgagtacg

SEQ ID NO: 134 - RNA, 21 nt, synthetic construct
  source 1..21: mol_type = other RNA
ctgggttgttaccgctacagc

SEQ ID NO: 135 - RNA, 21 nt, synthetic construct
  source 1..21: mol_type = other RNA
ctggcctggagaggtgtcctt

SEQ ID NO: 136 - RNA, 21 nt, synthetic construct
  source 1..21: mol_type = other RNA
gtgcgggtgcactatggcttg

SEQ ID NO: 137 - RNA, 21 nt, synthetic construct
  source 1..21: mol_type = other RNA
tggcaggaggtggcatcttgt

SEQ ID NO: 138 - RNA, 21 nt, synthetic construct
  source 1..21: mol_type = other RNA
ccctacagggccgagtacgaa

SEQ ID NO: 139 - RNA, 21 nt, synthetic construct
  source 1..21: mol_type = other RNA
acctgcttcttctggttcatt

SEQ ID NO: 140 - RNA, 21 nt, synthetic construct
  source 1..21: mol_type = other RNA
tgcctgtgatggggtcaagga

SEQ ID NO: 141 - RNA, 21 nt, synthetic construct
  source 1..21: mol_type = other RNA
cagcttcggaagcccctggtc

SEQ ID NO: 142 - RNA, 21 nt, synthetic construct
  source 1..21: mol_type = other RNA
cccctggtctaacttgggatc

SEQ ID NO: 143 - RNA, 21 nt, synthetic construct
  source 1..21: mol_type = other RNA
tgcttcttctggttcattctc

SEQ ID NO: 144 - RNA, 21 nt, synthetic construct
  source 1..21: mol_type = other RNA
cccaacggcctggatgagaga

SEQ ID NO: 145 - RNA, 21 nt, synthetic construct
  source 1..21: mol_type = other RNA
aagggcctgcacagctactac

SEQ ID NO: 146 - RNA, 21 nt, synthetic construct
  source 1..21: mol_type = other RNA
gtctaacttgggatctgggaa

SEQ ID NO: 147 - RNA, 21 nt, synthetic construct
  source 1..21: mol_type = other RNA
agcttcggaagcccctggtct

SEQ ID NO: 148 - RNA, 21 nt, synthetic construct
  source 1..21: mol_type = other RNA
ccagtgtgaaagacatagctg

SEQ ID NO: 149 - RNA, 21 nt, synthetic construct
  source 1..21: mol_type = other RNA
ccaggttcggggtcgacacat

SEQ ID NO: 150 - RNA, 21 nt, synthetic construct
  source 1..21: mol_type = other RNA
tccacgctgggttgttaccgc

SEQ ID NO: 151 - RNA, 21 nt, synthetic construct
  source 1..21: mol_type = other RNA
tgccaagcagggggacaagta

SEQ ID NO: 152 - RNA, 21 nt, synthetic construct
  source 1..21: mol_type = other RNA
atccagaacaggaggctgtgt

SEQ ID NO: 153 - RNA, 21 nt, synthetic construct
  source 1..21: mol_type = other RNA
ttcacctcccagatctccctc

SEQ ID NO: 154 - RNA, 21 nt, synthetic construct
  source 1..21: mol_type = other RNA
cctccgagggtgagtggccat

SEQ ID NO: 155 - RNA, 21 nt, synthetic construct
  source 1..21: mol_type = other RNA
tccagaacaggaggctgtgtg

SEQ ID NO: 156 - RNA, 21 nt, synthetic construct
  source 1..21: mol_type = other RNA
gtgtcctccgagggtgagtgg

SEQ ID NO: 157 - RNA, 21 nt, synthetic construct
  source 1..21: mol_type = other RNA
ttcggggtcgacacatctgtg

SEQ ID NO: 158 - RNA, 21 nt, synthetic construct
  source 1..21: mol_type = other RNA
tcggggtcgacacatctgtgg

SEQ ID NO: 159 - RNA, 21 nt, synthetic construct
  source 1..21: mol_type = other RNA
tgcttccaggaggacagcatg

SEQ ID NO: 160 - RNA, 21 nt, synthetic construct
  source 1..21: mol_type = other RNA
tctggtatttcctagggtaca

SEQ ID NO: 161 - RNA, 23 nt, synthetic construct
  source 1..23: mol_type = other RNA
ttgaaggacacctctccaggcca

SEQ ID NO: 162 - RNA, 23 nt, synthetic construct
  source 1..23: mol_type = other RNA
aggaaataccagagtagcacccc

SEQ ID NO: 163 - RNA, 23 nt, synthetic construct
  source 1..23: mol_type = other RNA
agtttctctcatccaggccgttg

SEQ ID NO: 164 - RNA, 23 nt, synthetic construct
  source 1..23: mol_type = other RNA
aagatcctgggagaagtggcgat

SEQ ID NO: 165 - RNA, 23 nt, synthetic construct
  source 1..23: mol_type = other RNA
acaagatgccacctcctgccacc

SEQ ID NO: 166 - RNA, 23 nt, synthetic construct
  source 1..23: mol_type = other RNA
acgtcatacatggccagtcggtc

SEQ ID NO: 167 - RNA, 23 nt, synthetic construct
  source 1..23: mol_type = other RNA
aagccatagtgcacccgcacacc

SEQ ID NO: 168 - RNA, 23 nt, synthetic construct
  source 1..23: mol_type = other RNA
acgcagtttctctcatccaggcc

SEQ ID NO: 169 - RNA, 23 nt, synthetic construct
  source 1..23: mol_type = other RNA
ttgtaccctaggaaataccagag

SEQ ID NO: 170 - RNA, 23 nt, synthetic construct
  source 1..23: mol_type = other RNA
agatcccaagttagaccaggggc

SEQ ID NO: 171 - RNA, 23 nt, synthetic construct
  source 1..23: mol_type = other RNA
acggcaaatcatacttctgcctc

SEQ ID NO: 172 - RNA, 23 nt, synthetic construct
  source 1..23: mol_type = other RNA
agctatgtctttcacactggctt

SEQ ID NO: 173 - RNA, 23 nt, synthetic construct
  source 1..23: mol_type = other RNA
atacatggccagtcggtcccggc

SEQ ID NO: 174 - RNA, 23 nt, synthetic construct
  source 1..23: mol_type = other RNA
atgtgtcgaccccgaacctggag

SEQ ID NO: 175 - RNA, 23 nt, synthetic construct
  source 1..23: mol_type = other RNA
gatcccaagttagaccaggggct

SEQ ID NO: 176 - RNA, 23 nt, synthetic construct
  source 1..23: mol_type = other RNA
taagatcctgggagaagtggcga

SEQ ID NO: 177 - RNA, 23 nt, synthetic construct
  source 1..23: mol_type = other RNA
tgtaccctaggaaataccagagt

SEQ ID NO: 178 - RNA, 23 nt, synthetic construct
  source 1..23: mol_type = other RNA
tgttatcacccagcggtcagcga

SEQ ID NO: 179 - RNA, 23 nt, synthetic construct
  source 1..23: mol_type = other RNA
tctctcatccaggccgttggggc

SEQ ID NO: 180 - RNA, 23 nt, synthetic construct
  source 1..23: mol_type = other RNA
gaatacttgtccccctgcttggc

SEQ ID NO: 181 - RNA, 23 nt, synthetic construct
  source 1..23: mol_type = other RNA
ttcgtactcggccctgtagggga

SEQ ID NO: 182 - RNA, 23 nt, synthetic construct
  source 1..23: mol_type = other RNA
tagctgtagcggtaacaacccag

SEQ ID NO: 183 - RNA, 23 nt, synthetic construct
  source 1..23: mol_type = other RNA
tgaaggacacctctccaggccag

SEQ ID NO: 184 - RNA, 23 nt, synthetic construct
  source 1..23: mol_type = other RNA
tacaagccatagtgcacccgcac

SEQ ID NO: 185 - RNA, 23 nt, synthetic construct
  source 1..23: mol_type = other RNA
agacaagatgccacctcctgcca

SEQ ID NO: 186 - RNA, 23 nt, synthetic construct
  source 1..23: mol_type = other RNA
acttcgtactcggccctgtaggg

SEQ ID NO: 187 - RNA, 23 nt, synthetic construct
  source 1..23: mol_type = other RNA
agaatgaaccagaagaagcaggt

SEQ ID NO: 188 - RNA, 23 nt, synthetic construct
  source 1..23: mol_type = other RNA
agtccttgaccccatcacaggca

SEQ ID NO: 189 - RNA, 23 nt, synthetic construct
  source 1..23: mol_type = other RNA
tagaccaggggcttccgaagctg

SEQ ID NO: 190 - RNA, 23 nt, synthetic construct
  source 1..23: mol_type = other RNA
cagatcccaagttagaccagggg

SEQ ID NO: 191 - RNA, 23 nt, synthetic construct
  source 1..23: mol_type = other RNA
tggagaatgaaccagaagaagca

SEQ ID NO: 192 - RNA, 23 nt, synthetic construct
  source 1..23: mol_type = other RNA
tttctctcatccaggccgttggg

SEQ ID NO: 193 - RNA, 23 nt, synthetic construct
  source 1..23: mol_type = other RNA
tcgtagtagctgtgcaggccctt

SEQ ID NO: 194 - RNA, 23 nt, synthetic construct
  source 1..23: mol_type = other RNA
cattcccagatcccaagttagac

SEQ ID NO: 195 - RNA, 23 nt, synthetic construct
  source 1..23: mol_type = other RNA
ttagaccaggggcttccgaagct

SEQ ID NO: 196 - RNA, 23 nt, synthetic construct
  source 1..23: mol_type = other RNA
tgcagctatgtctttcacactgg

SEQ ID NO: 197 - RNA, 23 nt, synthetic construct
  source 1..23: mol_type = other RNA
agatgtgtcgaccccgaacctgg

SEQ ID NO: 198 - RNA, 23 nt, synthetic construct
  source 1..23: mol_type = other RNA
tagcggtaacaacccagcgtgga

SEQ ID NO: 199 - RNA, 23 nt, synthetic construct
  source 1..23: mol_type = other RNA
aatacttgtccccctgcttggca

SEQ ID NO: 200 - RNA, 23 nt, synthetic construct
  source 1..23: mol_type = other RNA
ccacacagcctcctgttctggat

SEQ ID NO: 201 - RNA, 23 nt, synthetic construct
  source 1..23: mol_type = other RNA
gtgagggagatctgggaggtgaa

SEQ ID NO: 202 - RNA, 23 nt, synthetic construct
  source 1..23: mol_type = other RNA
ccatggccactcaccctcggagg

SEQ ID NO: 203 - RNA, 23 nt, synthetic construct
  source 1..23: mol_type = other RNA
gccacacagcctcctgttctgga

SEQ ID NO: 204 - RNA, 23 nt, synthetic construct
  source 1..23: mol_type = other RNA
ggccactcaccctcggaggacac

SEQ ID NO: 205 - RNA, 23 nt, synthetic construct
  source 1..23: mol_type = other RNA
cccacagatgtgtcgaccccgaa

SEQ ID NO: 206 - RNA, 23 nt, synthetic construct
  source 1..23: mol_type = other RNA
ccccacagatgtgtcgaccccga

SEQ ID NO: 207 - RNA, 23 nt, synthetic construct
  source 1..23: mol_type = other RNA
gccatgctgtcctcctggaagca

SEQ ID NO: 208 - RNA, 23 nt, synthetic construct
  source 1..23: mol_type = other RNA
tgtaccctaggaaataccagagt

SEQ ID NO: 209 - DNA, 21 bp, synthetic construct
  source 1..21: mol_type = other DNA
  modified_base 1: mod_base = OTHER; note = 2'-O-methyluridine-3'-phosphate
  modified_base 2: mod_base = OTHER; note = guanosine-3'-phosphate
  modified_base 3: mod_base = OTHER; note = guanosine-3'-phosphate
  modified_base 4: mod_base = OTHER; note = 2'-O-methyluridine-3'-phosphate
  modified_base 5: mod_base = OTHER; note = adenosine-3'-phosphate
  modified_base 6: mod_base = OTHER; note = 2'-O-methyluridine-3'-phosphate
  modified_base 7: mod_base = OTHER; note = 2'-O-methyluridine-3'-phosphate
  modified_base 8: mod_base = OTHER; note = 2'-O-methyluridine-3'-phosphate
  modified_base 9: mod_base = OTHER; note = 2'-O-methylcytidine-3'-phosphate
  modified_base 10: mod_base = OTHER; note = 2'-O-methylcytidine-3'-phosphate
  modified_base 11: mod_base = OTHER; note = 2'-O-methyluridine-3'-phosphate
  modified_base 12: mod_base = OTHER; note = adenosine-3'-phosphate
  modified_base 13: mod_base = OTHER; note = guanosine-3'-phosphate
  modified_base 14: mod_base = OTHER; note = guanosine-3'-phosphate
  modified_base 15: mod_base = OTHER; note = guanosine-3'-phosphate
  modified_base 16: mod_base = OTHER; note = 2'-O-methyluridine-3'-phosphate
  modified_base 17: mod_base = OTHER; note = adenosine-3'-phosphate
  modified_base 18: mod_base = OTHER; note = 2'-O-methylcytidine-3'-phosphate
  modified_base 19: mod_base = OTHER; note = adenosine-3'-phosphate
  modified_base 20: mod_base = OTHER; note = 2'-deoxythymidine-3'-phosphorothioate
  misc_feature 1..19: note = RNA
  misc_feature 20..21: note = DNA
tggtatttcctagggtacatt

SEQ ID NO: 210 - DNA, 21 bp, synthetic construct
  source 1..21: mol_type = other DNA
  modified_base 1: mod_base = OTHER; note = uridine-3'-phosphate
  modified_base 2: mod_base = OTHER; note = guanosine-3'-phosphate
  modified_base 3: mod_base = OTHER; note = 2'-O-methyluridine-3'-phosphate
  modified_base 4: mod_base = OTHER; note = adenosine-3'-phosphate
  modified_base 5: mod_base = OTHER; note = cytidine-3'-phosphate
  modified_base 6: mod_base = OTHER; note = cytidine-3'-phosphate
  modified_base 7: mod_base = OTHER; note = cytidine-3'-phosphate
  modified_base 8: mod_base = OTHER; note = 2'-O-methyluridine-3'-phosphate
  modified_base 9: mod_base = OTHER; note = adenosine-3'-phosphate
  modified_base 10: mod_base = OTHER; note = guanosine-3'-phosphate
  modified_base 11: mod_base = OTHER; note = guanosine-3'-phosphate
  modified_base 12: mod_base = OTHER; note = adenosine-3'-phosphate
  modified_base 13: mod_base = OTHER; note = adenosine-3'-phosphate
  modified_base 14: mod_base = OTHER; note = adenosine-3'-phosphate
  modified_base 15: mod_base = OTHER; note = 2'-O-methyluridine-3'-phosphate
  modified_base 16: mod_base = OTHER; note = adenosine-3'-phosphate
  modified_base 17: mod_base = OTHER; note = cytidine-3'-phosphate
  modified_base 18: mod_base = OTHER; note = 2'-O-methylcytidine-3'-phosphate
  modified_base 19: mod_base = OTHER; note = adenosine-3'-phosphate
  modified_base 20: mod_base = OTHER; note = 2'-deoxythymidine-3'-phosphorothioate
  misc_feature 1..19: note = RNA
  misc_feature 20..21: note = DNA
tgtaccctaggaaataccatt

SEQ ID NO: 211 - RNA, 21 nt, synthetic construct
  source 1..21: mol_type = other RNA
  modified_base 21: mod_base = OTHER; note = uridine-3'-phosphate
ggtgctactctggtatttcct

SEQ ID NO: 212 - RNA, 21 nt, synthetic construct
  source 1..21: mol_type = other RNA
  modified_base 21: mod_base = OTHER; note = adenosine-3'-phosphate
tctggtatttcctagggtaca

SEQ ID NO: 213 - RNA, 21 nt, synthetic construct
  source 1..21: mol_type = other RNA
  modified_base 21: mod_base = OTHER; note = adenosine-3'-phosphate
ctggtatttcctagggtacaa

SEQ ID NO: 214 - RNA, 21 nt, synthetic construct
  source 1..21: mol_type = other RNA
  modified_base 21: mod_base = OTHER; note = adenosine-3'-phosphate
tggtatttcctagggtacaaa

SEQ ID NO: 215 - RNA, 21 nt, synthetic construct
  source 1..21: mol_type = other RNA
  modified_base 21: mod_base = OTHER; note = adenosine-3'-phosphate
ggtatttcctagggtacaaga

SEQ ID NO: 216 - RNA, 19 nt, synthetic construct
  source 1..19: mol_type = other RNA
tggtatttcctagggtaca

SEQ ID NO: 217 - RNA, 21 nt, synthetic construct
  source 1..21: mol_type = other RNA
  modified_base 21: mod_base = OTHER; note = adenosine-3'-phosphate
gtatttcctagggtacaagga

SEQ ID NO: 218 - RNA, 21 nt, synthetic construct
  source 1..21: mol_type = other RNA
  modified_base 21: mod_base = OTHER; note = adenosine-3'-phosphate
atttcctagggtacaaggcga

SEQ ID NO: 219 - RNA, 21 nt, synthetic construct
  source 1..21: mol_type = other RNA
  modified_base 21: mod_base = OTHER; note = adenosine-3'-phosphate
tttcctagggtacaaggcgga

SEQ ID NO: 220 - RNA, 21 nt, synthetic construct
  source 1..21: mol_type = other RNA
  modified_base 21: mod_base = OTHER; note = uridine-3'-phosphate
cgccacttctcccaggatctt

SEQ ID NO: 221 - RNA, 21 nt, synthetic construct
  source 1..21: mol_type = other RNA
  modified_base 21: mod_base = OTHER; note = adenosine-3'-phosphate
gccacttctcccaggatctta

SEQ ID NO: 222 - RNA, 21 nt, synthetic construct
  source 1..21: mol_type = other RNA
  modified_base 21: mod_base = OTHER; note = uridine-3'-phosphate
ctgcttcttctggttcattct

SEQ ID NO: 223 - RNA, 21 nt, synthetic construct
  source 1..21: mol_type = other RNA
  modified_base 21: mod_base = OTHER; note = adenosine-3'-phosphate
cttcttctggttcattctcca

SEQ ID NO: 224 - RNA, 21 nt, synthetic construct
  source 1..21: mol_type = other RNA
  modified_base 21: mod_base = OTHER; note = adenosine-3'-phosphate
ccctacagggccgagtacgaa

SEQ ID NO: 225 - RNA, 21 nt, synthetic construct
  source 1..21: mol_type = other RNA
  modified_base 21: mod_base = OTHER; note = uridine-3'-phosphate
ctacagggccgagtacgaagt

SEQ ID NO: 226 - RNA, 21 nt, synthetic construct
  source 1..21: mol_type = other RNA
  modified_base 21: mod_base = OTHER; note = uridine-3'-phosphate
gccagtgtgaaagacatagct

SEQ ID NO: 227 - RNA, 21 nt, synthetic construct
  source 1..21: mol_type = other RNA
  modified_base 21: mod_base = OTHER; note = adenosine-3'-phosphate
agtgtgaaagacatagctgca

SEQ ID NO: 228 - RNA, 21 nt, synthetic construct
  source 1..21: mol_type = other RNA
  modified_base 21: mod_base = OTHER; note = adenosine-3'-phosphate
cacgctgggttgttaccgcta

SEQ ID NO: 229 - RNA, 21 nt, synthetic construct
  source 1..21: mol_type = other RNA
  modified_base 21: mod_base = OTHER; note = adenosine-3'-phosphate
gggttgttaccgctacagcta

SEQ ID NO: 230 - RNA, 21 nt, synthetic construct
  source 1..21: mol_type = other RNA
  modified_base 21: mod_base = OTHER; note = uridine-3'-phosphate
cgggaccgactggccatgtat

SEQ ID NO: 231 - RNA, 21 nt, synthetic construct
  source 1..21: mol_type = other RNA
  modified_base 21: mod_base = OTHER; note = uridine-3'-phosphate
ccgactggccatgtatgacgt

SEQ ID NO: 232 - RNA, 21 nt, synthetic construct
  source 1..21: mol_type = other RNA
  modified_base 21: mod_base = OTHER; note = adenosine-3'-phosphate
gggcctgcacagctactacga

SEQ ID NO: 233 - RNA, 21 nt, synthetic construct
  source 1..21: mol_type = other RNA
  modified_base 21: mod_base = OTHER; note = uridine-3'-phosphate
ggcagaagtatgatttgccgt

SEQ ID NO: 234 - RNA, 21 nt, synthetic construct
  source 1..21: mol_type = other RNA
  modified_base 21: mod_base = OTHER; note = guanosine-3'-phosphate
ccagaacaggaggctgtgtgg

SEQ ID NO: 235 - RNA, 21 nt, synthetic construct
  source 1..21: mol_type = other RNA
  modified_base 21: mod_base = OTHER; note = cytidine-3'-phosphate
cagaacaggaggctgtgtggc

SEQ ID NO: 236 - RNA, 21 nt, synthetic construct
  source 1..21: mol_type = other RNA
  modified_base 21: mod_base = OTHER; note = cytidine-3'-phosphate
cacctcccagatctccctcac

SEQ ID NO: 237 - RNA, 21 nt, synthetic construct
  source 1..21: mol_type = other RNA
  modified_base 21: mod_base = OTHER; note = adenosine-3'-phosphate
cacctcccagatctccctcaa

SEQ ID NO: 238 - RNA, 21 nt, synthetic construct
  source 1..21: mol_type = other RNA
  modified_base 21: mod_base = OTHER; note = uridine-3'-phosphate
tgtgcgggtgcactatggctt

SEQ ID NO: 239 - RNA, 21 nt, synthetic construct
  source 1..21: mol_type = other RNA
  modified_base 21: mod_base = OTHER; note = adenosine-3'-phosphate
gcgggtgcactatggcttgta

SEQ ID NO: 240 - RNA, 21 nt, synthetic construct
  source 1..21: mol_type = other RNA
  modified_base 21: mod_base = OTHER; note = uridine-3'-phosphate
cccctgccctggagagttcct

SEQ ID NO: 241 - RNA, 21 nt, synthetic construct
  source 1..21: mol_type = other RNA
  modified_base 21: mod_base = OTHER; note = adenosine-3'-phosphate
ccctgccctggagagttccta

SEQ ID NO: 242 - RNA, 21 nt, synthetic construct
  source 1..21: mol_type = other RNA
  modified_base 21: mod_base = OTHER; note = uridine-3'-phosphate
cctgccctggagagttcctct

SEQ ID NO: 243 - RNA, 21 nt, synthetic construct
  source 1..21: mol_type = other RNA
  modified_base 21: mod_base = OTHER; note = adenosine-3'-phosphate
ctgccctggagagttcctcta

SEQ ID NO: 244 - RNA, 21 nt, synthetic construct
  source 1..21: mol_type = other RNA
  modified_base 21: mod_base = OTHER; note = uridine-3'-phosphate
cctgtgatggggtcaaggact

SEQ ID NO: 245 - RNA, 21 nt, synthetic construct
  source 1..21: mol_type = other RNA
  modified_base 21: mod_base = OTHER; note = adenosine-3'-phosphate
ggactgccccaacggcctgga

SEQ ID NO: 246 - RNA, 21 nt, synthetic construct
  source 1..21: mol_type = other RNA
  modified_base 21: mod_base = OTHER; note = adenosine-3'-phosphate
actgccccaacggcctggata

SEQ ID NO: 247 - RNA, 21 nt, synthetic construct
  source 1..21: mol_type = other RNA
  modified_base 21: mod_base = OTHER; note = adenosine-3'-phosphate
ctgccccaacggcctggatga

SEQ ID NO: 248 - RNA, 21 nt, synthetic construct
  source 1..21: mol_type = other RNA
  modified_base 21: mod_base = OTHER; note = adenosine-3'-phosphate
tgccccaacggcctggatgaa

SEQ ID NO: 249 - RNA, 21 nt, synthetic construct
  source 1..21: mol_type = other RNA
  modified_base 21: mod_base = OTHER; note = adenosine-3'-phosphate
gccccaacggcctggatgaga

SEQ ID NO: 250 - RNA, 21 nt, synthetic construct
  source 1..21: mol_type = other RNA
  modified_base 21: mod_base = OTHER; note = adenosine-3'-phosphate
ccccaacggcctggatgagaa

SEQ ID NO: 251 - RNA, 21 nt, synthetic construct
  source 1..21: mol_type = other RNA
  modified_base 21: mod_base = OTHER; note = adenosine-3'-phosphate
cccaacggcctggatgagaga

SEQ ID NO: 252 - RNA, 21 nt, synthetic construct
  source 1..21: mol_type = other RNA
  modified_base 21: mod_base = OTHER; note = adenosine-3'-phosphate
caacggcctggatgagagaaa

SEQ ID NO: 253 - RNA, 21 nt, synthetic construct
  source 1..21: mol_type = other RNA
  modified_base 21: mod_base = OTHER; note = uridine-3'-phosphate
acggcctggatgagagaaact

SEQ ID NO: 254 - RNA, 21 nt, synthetic construct
  source 1..21: mol_type = other RNA
  modified_base 21: mod_base = OTHER; note = uridine-3'-phosphate
cctggatgagagaaactgcgt

SEQ ID NO: 255 - RNA, 21 nt, synthetic construct
  source 1..21: mol_type = other RNA
  modified_base 21: mod_base = OTHER; note = adenosine-3'-phosphate
cactgtgactgtggcctccaa

SEQ ID NO: 256 - RNA, 21 nt, synthetic construct
  source 1..21: mol_type = other RNA
  modified_base 21: mod_base = OTHER; note = cytidine-3'-phosphate
gtcctccgagggtgagtggcc

SEQ ID NO: 257 - RNA, 21 nt, synthetic construct
  source 1..21: mol_type = other RNA
  modified_base 21: mod_base = OTHER; note = adenosine-3'-phosphate
ctccgagggtgagtggccata

SEQ ID NO: 258 - RNA, 21 nt, synthetic construct
  source 1..21: mol_type = other RNA
  modified_base 21: mod_base = OTHER; note = guanosine-3'-phosphate
tccgagggtgagtggccatgg

SEQ ID NO: 259 - RNA, 21 nt, synthetic construct
  source 1..21: mol_type = other RNA
  modified_base 21: mod_base = OTHER; note = uridine-3'-phosphate
ccaggttcggggtcgacacat

SEQ ID NO: 260 - RNA, 21 nt, synthetic construct
  source 1..21: mol_type = other RNA
  modified_base 21: mod_base = OTHER; note = uridine-3'-phosphate
aggttcggggtcgacacatct

SEQ ID NO: 261 - RNA, 21 nt, synthetic construct
  source 1..21: mol_type = other RNA
  modified_base 21: mod_base = OTHER; note = guanosine-3'-phosphate
cggggtcgacacatctgtggg

SEQ ID NO: 262 - RNA, 21 nt, synthetic construct
  source 1..21: mol_type = other RNA
  modified_base 21: mod_base = OTHER; note = adenosine-3'-phosphate
cggggtcgacacatctgtgga

SEQ ID NO: 263 - RNA, 21 nt, synthetic construct
  source 1..21: mol_type = other RNA
  modified_base 21: mod_base = OTHER; note = guanosine-3'-phosphate
ggggtcgacacatctgtgggg

SEQ ID NO: 264 - RNA, 21 nt, synthetic construct
  source 1..21: mol_type = other RNA
  modified_base 21: mod_base = OTHER; note = adenosine-3'-phosphate
ggggtcgacacatctgtggga

SEQ ID NO: 265 - RNA, 21 nt, synthetic construct
  source 1..21: mol_type = other RNA
  modified_base 21: mod_base = OTHER; note = adenosine-3'-phosphate
gggtcgacacatctgtgggga

SEQ ID NO: 266 - RNA, 21 nt, synthetic construct
  source 1..21: mol_type = other RNA
  modified_base 21: mod_base = OTHER; note = adenosine-3'-phosphate
gctgaccgctgggtgataaca

SEQ ID NO: 267 - RNA, 21 nt, synthetic construct
  source 1..21: mol_type = other RNA
  modified_base 21: mod_base = OTHER; note = cytidine-3'-phosphate
cttccaggaggacagcatggc

SEQ ID NO: 268 - RNA, 21 nt, synthetic construct
  source 1..21: mol_type = other RNA
  modified_base 21: mod_base = OTHER; note = adenosine-3'-phosphate
ggcctggagaggtgtccttca

SEQ ID NO: 269 - RNA, 21 nt, synthetic construct
  source 1..21: mol_type = other RNA
  modified_base 21: mod_base = OTHER; note = adenosine-3'-phosphate
gcctggagaggtgtccttcaa

SEQ ID NO: 270 - RNA, 21 nt, synthetic construct
  source 1..21: mol_type = other RNA
  modified_base 21: mod_base = OTHER; note = uridine-3'-phosphate
ccaagcagggggacaagtatt

SEQ ID NO: 271 - RNA, 21 nt, synthetic construct
  source 1..21: mol_type = other RNA
  modified_base 21: mod_base = OTHER; note = cytidine-3'-phosphate
caagcagggggacaagtattc

SEQ ID NO: 272 - RNA, 21 nt, synthetic construct
  source 1..21: mol_type = other RNA
  modified_base 21: mod_base = OTHER; note = uridine-3'-phosphate
tggcaggaggtggcatcttgt

SEQ ID NO: 273 - RNA, 21 nt, synthetic construct
  source 1..21: mol_type = other RNA
  modified_base 21: mod_base = OTHER; note = uridine-3'-phosphate
gcaggaggtggcatcttgtct

SEQ ID NO: 274 - RNA, 21 nt, synthetic construct
  source 1..21: mol_type = other RNA
  modified_base 21: mod_base = OTHER; note = adenosine-3'-phosphate
gcttcggaagcccctggtcta

SEQ ID NO: 275 - RNA, 21 nt, synthetic construct
  source 1..21: mol_type = other RNA
  modified_base 21: mod_base = OTHER; note = adenosine-3'-phosphate
cttcggaagcccctggtctaa

SEQ ID NO: 276 - RNA, 21 nt, synthetic construct
  source 1..21: mol_type = other RNA
  modified_base 21: mod_base = OTHER; note = cytidine-3'-phosphate
cccctggtctaacttgggatc

SEQ ID NO: 277 - RNA, 21 nt, synthetic construct
  source 1..21: mol_type = other RNA
  modified_base 21: mod_base = OTHER; note = uridine-3'-phosphate
ccctggtctaacttgggatct

SEQ ID NO: 278 - RNA, 21 nt, synthetic construct
  source 1..21: mol_type = other RNA
  modified_base 21: mod_base = OTHER; note = guanosine-3'-phosphate
cctggtctaacttgggatctg

SEQ ID NO: 279 - RNA, 21 nt, synthetic construct
  source 1..21: mol_type = other RNA
  modified_base 21: mod_base = OTHER; note = guanosine-3'-phosphate
ctaacttgggatctgggaatg

SEQ ID NO: 280 - RNA, 23 nt, synthetic construct
  source 1..23: mol_type = other RNA
aggaaataccagagtagcacccc

SEQ ID NO: 281 - RNA, 23 nt, synthetic construct
  source 1..23: mol_type = other RNA
tgtaccctaggaaataccagagt

SEQ ID NO: 282 - RNA, 23 nt, synthetic construct
  source 1..23: mol_type = other RNA
ttgtaccctaggaaataccagag

SEQ ID NO: 283 - RNA, 23 nt, synthetic construct
  source 1..23: mol_type = other RNA
tttgtaccctaggaaataccaga

SEQ ID NO: 284 - RNA, 23 nt, synthetic construct
  source 1..23: mol_type = other RNA
tcttgtaccctaggaaataccag

SEQ ID NO: 285 - RNA, 19 nt, synthetic construct
  source 1..19: mol_type = other RNA
tgtaccctaggaaatacca

SEQ ID NO: 286 - RNA, 23 nt, synthetic construct
  source 1..23: mol_type = other RNA
tccttgtaccctaggaaatacca

SEQ ID NO: 287 - RNA, 23 nt, synthetic construct
  source 1..23: mol_type = other RNA
tcgccttgtaccctaggaaatac

SEQ ID NO: 288 - RNA, 23 nt, synthetic construct
  source 1..23: mol_type = other RNA
tccgccttgtaccctaggaaata

SEQ ID NO: 289 - RNA, 23 nt, synthetic construct
  source 1..23: mol_type = other RNA
aagatcctgggagaagtggcgat

SEQ ID NO: 290 - RNA, 23 nt, synthetic construct
  source 1..23: mol_type = other RNA
taagatcctgggagaagtggcga

SEQ ID NO: 291 - RNA, 23 nt, synthetic construct
  source 1..23: mol_type = other RNA
agaatgaaccagaagaagcaggt

SEQ ID NO: 292 - RNA, 23 nt, synthetic construct
  source 1..23: mol_type = other RNA
tggagaatgaaccagaagaagca

SEQ ID NO: 293 - RNA, 23 nt, synthetic construct
  source 1..23: mol_type = other RNA
ttcgtactcggccctgtagggga

SEQ ID NO: 294 - RNA, 23 nt, synthetic construct
  source 1..23: mol_type = other RNA
acttcgtactcggccctgtaggg

SEQ ID NO: 295 - RNA, 23 nt, synthetic construct
  source 1..23: mol_type = other RNA
agctatgtctttcacactggctt

SEQ ID NO: 296 - RNA, 23 nt, synthetic construct
  source 1..23: mol_type = other RNA
tgcagctatgtctttcacactgg

SEQ ID NO: 297 - RNA, 23 nt, synthetic construct
  source 1..23: mol_type = other RNA
tagcggtaacaacccagcgtgga

SEQ ID NO: 298 - RNA, 23 nt, synthetic construct
  source 1..23: mol_type = other RNA
tagctgtagcggtaacaacccag

SEQ ID NO: 299 - RNA, 23 nt, synthetic construct
  source 1..23: mol_type = other RNA
atacatggccagtcggtcccggc

SEQ ID NO: 300 - RNA, 23 nt, synthetic construct
  source 1..23: mol_type = other RNA
acgtcatacatggccagtcggtc

SEQ ID NO: 301 - RNA, 23 nt, synthetic construct
  source 1..23: mol_type = other RNA
tcgtagtagctgtgcaggccctt

SEQ ID NO: 302 - RNA, 23 nt, synthetic construct
  source 1..23: mol_type = other RNA
acggcaaatcatacttctgcctc

SEQ ID NO: 303 - RNA, 23 nt, synthetic construct
  source 1..23: mol_type = other RNA
ccacacagcctcctgttctggat

SEQ ID NO: 304 - RNA, 23 nt, synthetic construct
  source 1..23: mol_type = other RNA
gccacacagcctcctgttctgga

SEQ ID NO: 305 - RNA, 23 nt, synthetic construct
  source 1..23: mol_type = other RNA
gtgagggagatctgggaggtgaa

SEQ ID NO: 306 - RNA, 23 nt, synthetic construct
  source 1..23: mol_type = other RNA
ttgagggagatctgggaggtgaa

SEQ ID NO: 307 - RNA, 23 nt, synthetic construct
  source 1..23: mol_type = other RNA
aagccatagtgcacccgcacacc

SEQ ID NO: 308 - RNA, 23 nt, synthetic construct
  source 1..23: mol_type = other RNA
tacaagccatagtgcacccgcac

SEQ ID NO: 309 - RNA, 23 nt, synthetic construct
  source 1..23: mol_type = other RNA
aggaactctccagggcaggggtc

SEQ ID NO: 310 - RNA, 23 nt, synthetic construct
  source 1..23: mol_type = other RNA
taggaactctccagggcaggggt

SEQ ID NO: 311 - RNA, 23 nt, synthetic construct
  source 1..23: mol_type = other RNA
agaggaactctccagggcagggg

SEQ ID NO: 312 - RNA, 23 nt, synthetic construct
  source 1..23: mol_type = other RNA
tagaggaactctccagggcaggg

SEQ ID NO: 313 - RNA, 23 nt, synthetic construct
  source 1..23: mol_type = other RNA
agtccttgaccccatcacaggca

SEQ ID NO: 314 - RNA, 23 nt, synthetic construct
  source 1..23: mol_type = other RNA
tccaggccgttggggcagtcctt

SEQ ID NO: 315 - RNA, 23 nt, synthetic construct
  source 1..23: mol_type = other RNA
tatccaggccgttggggcagtcc

SEQ ID NO: 316 - RNA, 23 nt, synthetic construct
  source 1..23: mol_type = other RNA
tcatccaggccgttggggcagtc

SEQ ID NO: 317 - RNA, 23 nt, synthetic construct
  source 1..23: mol_type = other RNA
ttcatccaggccgttggggcagt

SEQ ID NO: 318 - RNA, 23 nt, synthetic construct
  source 1..23: mol_type = other RNA
tctcatccaggccgttggggcag

SEQ ID NO: 319 - RNA, 23 nt, synthetic construct
  source 1..23: mol_type = other RNA
ttctcatccaggccgttggggca

SEQ ID NO: 320 - RNA, 23 nt, synthetic construct
  source 1..23: mol_type = other RNA
tctctcatccaggccgttggggc

SEQ ID NO: 321 - RNA, 23 nt, synthetic construct
  source 1..23: mol_type = other RNA
tttctctcatccaggccgttggg

SEQ ID NO: 322 - RNA, 23 nt, synthetic construct
  source 1..23: mol_type = other RNA
agtttctctcatccaggccgttg

SEQ ID NO: 323 - RNA, 23 nt, synthetic construct
  source 1..23: mol_type = other RNA
acgcagtttctctcatccaggcc

SEQ ID NO: 324 - RNA, 23 nt, synthetic construct
  source 1..23: mol_type = other RNA
ttggaggccacagtcacagtgct

SEQ ID NO: 325 - RNA, 23 nt, synthetic construct
  source 1..23: mol_type = other RNA
ggccactcaccctcggaggacac

SEQ ID NO: 326 - RNA, 23 nt, synthetic construct
  source 1..23: mol_type = other RNA
tatggccactcaccctcggagga

SEQ ID NO: 327 - RNA, 23 nt, synthetic construct
  source 1..23: mol_type = other RNA
ccatggccactcaccctcggagg

SEQ ID NO: 328 - RNA, 23 nt, synthetic construct
  source 1..23: mol_type = other RNA
atgtgtcgaccccgaacctggag

SEQ ID NO: 329 - RNA, 23 nt, synthetic construct
  source 1..23: mol_type = other RNA
agatgtgtcgaccccgaacctgg

SEQ ID NO: 330 - RNA, 23 nt, synthetic construct
  source 1..23: mol_type = other RNA
cccacagatgtgtcgaccccgaa

SEQ ID NO: 331 - RNA, 23 nt, synthetic construct
  source 1..23: mol_type = other RNA
tccacagatgtgtcgaccccgaa

SEQ ID NO: 332 - RNA, 23 nt, synthetic construct
  source 1..23: mol_type = other RNA
ccccacagatgtgtcgaccccga

SEQ ID NO: 333 - RNA, 23 nt, synthetic construct
  source 1..23: mol_type = other RNA
tcccacagatgtgtcgaccccga

SEQ ID NO: 334 - RNA, 23 nt, synthetic construct
  source 1..23: mol_type = other RNA
tccccacagatgtgtcgaccccg

SEQ ID NO: 335 - RNA, 23 nt, synthetic construct
  source 1..23: mol_type = other RNA
tgttatcacccagcggtcagcga

SEQ ID NO: 336 - RNA, 23 nt, synthetic construct
  source 1..23: mol_type = other RNA
gccatgctgtcctcctggaagca

SEQ ID NO: 337 - RNA, 23 nt, synthetic construct
  source 1..23: mol_type = other RNA
tgaaggacacctctccaggccag

SEQ ID NO: 338 - RNA, 23 nt, synthetic construct
  source 1..23: mol_type = other RNA
ttgaaggacacctctccaggcca

SEQ ID NO: 339 - RNA, 23 nt, synthetic construct
  source 1..23: mol_type = other RNA
aatacttgtccccctgcttggca

SEQ ID NO: 340 - RNA, 23 nt, synthetic construct
  source 1..23: mol_type = other RNA
gaatacttgtccccctgcttggc

SEQ ID NO: 341 - RNA, 23 nt, synthetic construct
  source 1..23: mol_type = other RNA
acaagatgccacctcctgccacc

SEQ ID NO: 342 - RNA, 23 nt, synthetic construct
  source 1..23: mol_type = other RNA
agacaagatgccacctcctgcca

SEQ ID NO: 343 - RNA, 23 nt, synthetic construct
  source 1..23: mol_type = other RNA
tagaccaggggcttccgaagctg

SEQ ID NO: 344 - RNA, 23 nt, synthetic construct
  source 1..23: mol_type = other RNA
ttagaccaggggcttccgaagct

SEQ ID NO: 345 - RNA, 23 nt, synthetic construct
  source 1..23: mol_type = other RNA
gatcccaagttagaccaggggct

SEQ ID NO: 346 - RNA, 23 nt, synthetic construct
  source 1..23: mol_type = other RNA
agatcccaagttagaccaggggc

SEQ ID NO: 347 - RNA, 23 nt, synthetic construct
  source 1..23: mol_type = other RNA
cagatcccaagttagaccagggg

SEQ ID NO: 348 - RNA, 23 nt, synthetic construct
  source 1..23: mol_type = other RNA
cattcccagatcccaagttagac

SEQ ID NO: 349 - DNA, 21 bp, synthetic construct
  source 1..21: mol_type = other DNA
  modified_base 1: mod_base = OTHER; note = 2'-O-methyluridine-3'-phosphate
  modified_base 2: mod_base = OTHER; note = guanosine-3'-phosphate
  modified_base 3: mod_base = OTHER; note = guanosine-3'-phosphate
  modified_base 4: mod_base = OTHER; note = 2'-O-methyluridine-3'-phosphate
  modified_base 5: mod_base = OTHER; note = adenosine-3'-phosphate
  modified_base 6: mod_base = OTHER; note = 2'-O-methyluridine-3'-phosphate
  modified_base 7: mod_base = OTHER; note = 2'-O-methyluridine-3'-phosphate
  modified_base 8: mod_base = OTHER; note = 2'-O-methyluridine-3'-phosphate
  modified_base 9: mod_base = OTHER; note = 2'-O-methylcytidine-3'-phosphate
  modified_base 10: mod_base = OTHER; note = 2'-O-methylcytidine-3'-phosphate
  modified_base 11: mod_base = OTHER; note = 2'-O-methyluridine-3'-phosphate
  modified_base 12: mod_base = OTHER; note = adenosine-3'-phosphate
  modified_base 13: mod_base = OTHER; note = guanosine-3'-phosphate
  modified_base 14: mod_base = OTHER; note = guanosine-3'-phosphate
  modified_base 15: mod_base = OTHER; note = guanosine-3'-phosphate
  modified_base 16: mod_base = OTHER; note = 2'-O-methyluridine-3'-phosphate
  modified_base 17: mod_base = OTHER; note = adenosine-3'-phosphate
  modified_base 18: mod_base = OTHER; note = 2'-O-methylcytidine-3'-phosphate
  modified_base 19: mod_base = OTHER; note = adenosine-3'-phosphate
  modified_base 20: mod_base = OTHER; note = 2'-deoxythymidine-3'-phosphorothioate
  misc_feature 1..19: note = RNA
  misc_feature 20..21: note = DNA
tggtatttcctagggtacatt

SEQ ID NO: 350 - RNA, 21 nt, synthetic construct
  source 1..21: mol_type = other RNA
  modified_base 1: mod_base = OTHER; note = 2'-deoxy-2'-fluorouridine-3'-phosphorothioate
  modified_base 2: mod_base = OTHER; note = 2'-O-methylcytidine-3'-phosphorothioate
  modified_base 3: mod_base = OTHER; note = 2'-deoxy-2'-fluorouridine-3'-phosphate
  modified_base 4: mod_base = OTHER; note = 2'-O-methylguanosine-3'-phosphate
  modified_base 5: mod_base = OTHER; note = 2'-deoxy-2'-fluoroguanosine-3'-phosphate
  modified_base 6: mod_base = OTHER; note = 2'-O-methyluridine-3'-phosphate
  modified_base 7: mod_base = OTHER; note = 2'-deoxy-2'-fluoroadenosine-3'-phosphate
  modified_base 8: mod_base = OTHER; note = 2'-O-methyluridine-3'-phosphate
  modified_base 9: mod_base = OTHER; note = 2'-deoxy-2'-fluorouridine-3'-phosphate
  modified_base 10: mod_base = OTHER; note = 2'-deoxy-2'-fluorouridine-3'-phosphate
  modified_base 11: mod_base = OTHER; note = 2'-deoxy-2'-fluorocytidine-3'-phosphate
  modified_base 12: mod_base = OTHER; note = 2'-O-methylcytidine-3'-phosphate
  modified_base 13: mod_base = OTHER; note = 2'-deoxy-2'-fluorouridine-3'-phosphate
  modified_base 14: mod_base = OTHER; note = 2'-O-methyladenosine-3'-phosphate
  modified_base 15: mod_base = OTHER; note = 2'-deoxy-2'-fluoroguanosine-3'-phosphate
  modified_base 16: mod_base = OTHER; note = 2'-O-methylguanosine-3'-phosphate
  modified_base 17: mod_base = OTHER; note = 2'-deoxy-2'-fluoroguanosine-3'-phosphate
  modified_base 18: mod_base = OTHER; note = 2'-O-methyluridine-3'-phosphate
  modified_base 19: mod_base = OTHER; note = 2'-deoxy-2'-fluoroadenosine-3'-phosphate
  modified_base 20: mod_base = OTHER; note = 2'-O-methylcytidine-3'-phosphate
  modified_base 21: mod_base = OTHER; note = 2'-deoxy-2'-fluoroadenosine-3'-phosphate ((2S,4R)-1-[29-[[2-(acetylamino)-2-deoxy-beta-D-galactopyra nosyl]oxy]-14,14-bis[[3-[[3-[[5-[[2-(acetylamino)-2-deoxy-b eta-D-galactopyranosyl]oxy]-1-oxopentyl]amino]propyl]amino] -3-oxopropoxy]methyl]-1,12,19,25-tetraoxo-16-oxa-13,20,24-t riazanonacos-1-yl]-4-hydroxy-2-pyrrolidinyl)methyl ester
tctggtatttcctagggtaca

SEQ ID NO: 351 - RNA, 21 nt, synthetic construct
  source 1..21: mol_type = other RNA
  modified_base 1: mod_base = OTHER; note = 2'-deoxy-2'-fluoroguanosine-3'-phosphorothioate
  modified_base 2: mod_base = OTHER; note = 2'-O-methylcytidine-3'-phosphorothioate
  modified_base 3: mod_base = OTHER; note = 2'-deoxy-2'-fluorocytidine-3'-phosphate
  modified_base 4: mod_base = OTHER; note = 2'-O-methyluridine-3'-phosphate
  modified_base 5: mod_base = OTHER; note = 2'-deoxy-2'-fluoroguanosine-3'-phosphate
  modified_base 6: mod_base = OTHER; note = 2'-O-methylguanosine-3'-phosphate
  modified_base 7: mod_base = OTHER; note = 2'-deoxy-2'-fluoroadenosine-3'-phosphate
  modified_base 8: mod_base = OTHER; note = 2'-O-methylguanosine-3'-phosphate
  modified_base 9: mod_base = OTHER; note = 2'-deoxy-2'-fluoroadenosine-3'-phosphate
  modified_base 10: mod_base = OTHER; note = 2'-deoxy-2'-fluoroguanosine-3'-phosphate
  modified_base 11: mod_base = OTHER; note = 2'-deoxy-2'-fluoroguanosine-3'-phosphate
  modified_base 12: mod_base = OTHER; note = 2'-O-methyluridine-3'-phosphate
  modified_base 13: mod_base = OTHER; note = 2'-deoxy-2'-fluoroguanosine-3'-phosphate
  modified_base 14: mod_base = OTHER; note = 2'-O-methyluridine-3'-phosphate
  modified_base 15: mod_base = OTHER; note = 2'-deoxy-2'-fluorocytidine-3'-phosphate
  modified_base 16: mod_base = OTHER; note = 2'-O-methylcytidine-3'-phosphate
  modified_base 17: mod_base = OTHER; note = 2'-deoxy-2'-fluorouridine-3'-phosphate
  modified_base 18: mod_base = OTHER; note = 2'-O-methyluridine-3'-phosphate
  modified_base 19: mod_base = OTHER; note = 2'-deoxy-2'-fluorocytidine-3'-phosphate
  modified_base 20: mod_base = OTHER; note = 2'-O-methyladenosine-3'-phosphate
  modified_base 21: mod_base = OTHER; note = 2'-deoxy-2'-fluoroadenosine-3'-phosphate ((2S,4R)-1-[29-[[2-(acetylamino)-2-deoxy-beta-D-galactopyra nosyl]oxy]-14,14-bis[[3-[[3-[[5-[[2-(acetylamino)-2-deoxy-b eta-D-galactopyranosyl]oxy]-1-oxopentyl]amino]propyl]amino] -3-oxopropoxy]methyl]-1,12,19,25-tetraoxo-16-oxa-13,20,24-t riazanonacos-1-yl]-4-hydroxy-2-pyrrolidinyl)methyl ester
gcctggagaggtgtccttcaa

SEQ ID NO: 352 - RNA, 21 nt, synthetic construct
  source 1..21: mol_type = other RNA
  modified_base 1: mod_base = OTHER; note = 2'-deoxy-2'-fluorocytidine-3'-phosphorothioate
  modified_base 2: mod_base = OTHER; note = 2'-O-methyluridine-3'-phosphorothioate
  modified_base 3: mod_base = OTHER; note = 2'-deoxy-2'-fluoroguanosine-3'-phosphate
  modified_base 4: mod_base = OTHER; note = 2'-O-methylguanosine-3'-phosphate
  modified_base 5: mod_base = OTHER; note = 2'-deoxy-2'-fluorouridine-3'-phosphate
  modified_base 6: mod_base = OTHER; note = 2'-O-methyladenosine-3'-phosphate
  modified_base 7: mod_base = OTHER; note = 2'-deoxy-2'-fluorouridine-3'-phosphate
  modified_base 8: mod_base = OTHER; note = 2'-O-methyluridine-3'-phosphate
  modified_base 9: mod_base = OTHER; note = 2'-deoxy-2'-fluorouridine-3'-phosphate
  modified_base 10: mod_base = OTHER; note = 2'-deoxy-2'-fluorocytidine-3'-phosphate
  modified_base 11: mod_base = OTHER; note = 2'-deoxy-2'-fluorocytidine-3'-phosphate
  modified_base 12: mod_base = OTHER; note = 2'-O-methyluridine-3'-phosphate
  modified_base 13: mod_base = OTHER; note = 2'-deoxy-2'-fluoroadenosine-3'-phosphate
  modified_base 14: mod_base = OTHER; note = 2'-O-methylguanosine-3'-phosphate
  modified_base 15: mod_base = OTHER; note = 2'-deoxy-2'-fluoroguanosine-3'-phosphate
  modified_base 16: mod_base = OTHER; note = 2'-O-methylguanosine-3'-phosphate
  modified_base 17: mod_base = OTHER; note = 2'-deoxy-2'-fluorouridine-3'-phosphate
  modified_base 18: mod_base = OTHER; note = 2'-O-methyladenosine-3'-phosphate
  modified_base 19: mod_base = OTHER; note = 2'-deoxy-2'-fluorocytidine-3'-phosphate
  modified_base 20: mod_base = OTHER; note = 2'-O-methyladenosine-3'-phosphate
  modified_base 21: mod_base = OTHER; note = 2'-deoxy-2'-fluoroadenosine-3'-phosphate ((2S,4R)-1-[29-[[2-(acetylamino)-2-deoxy-beta-D-galactopyra nosyl]oxy]-14,14-bis[[3-[[3-[[5-[[2-(acetylamino)-2-deoxy-b eta-D-galactopyranosyl]oxy]-1-oxopentyl]amino]propyl]amino] -3-oxopropoxy]methyl]-1,12,19,25-tetraoxo-16-oxa-13,20,24-t riazanonacos-1-yl]-4-hydroxy-2-pyrrolidinyl)methyl ester
ctggtatttcctagggtacaa

SEQ ID NO: 353 - RNA, 21 nt, synthetic construct
  source 1..21: mol_type = other RNA
  modified_base 1: mod_base = OTHER; note = 2'-deoxy-2'-fluoroguanosine-3'-phosphorothioate
  modified_base 2: mod_base = OTHER; note = 2'-O-methylcytidine-3'-phosphorothioate
  modified_base 3: mod_base = OTHER; note = 2'-deoxy-2'-fluoroadenosine-3'-phosphate
  modified_base 4: mod_base = OTHER; note = 2'-O-methylguanosine-3'-phosphate
  modified_base 5: mod_base = OTHER; note = 2'-deoxy-2'-fluoroguanosine-3'-phosphate
  modified_base 6: mod_base = OTHER; note = 2'-O-methyladenosine-3'-phosphate
  modified_base 7: mod_base = OTHER; note = 2'-deoxy-2'-fluoroguanosine-3'-phosphate
  modified_base 8: mod_base = OTHER; note = 2'-O-methylguanosine-3'-phosphate
  modified_base 9: mod_base = OTHER; note = 2'-deoxy-2'-fluorouridine-3'-phosphate
  modified_base 10: mod_base = OTHER; note = 2'-deoxy-2'-fluoroguanosine-3'-phosphate
  modified_base 11: mod_base = OTHER; note = 2'-deoxy-2'-fluoroguanosine-3'-phosphate
  modified_base 12: mod_base = OTHER; note = 2'-O-methylcytidine-3'-phosphate
  modified_base 13: mod_base = OTHER; note = 2'-deoxy-2'-fluoroadenosine-3'-phosphate
  modified_base 14: mod_base = OTHER; note = 2'-O-methyluridine-3'-phosphate
  modified_base 15: mod_base = OTHER; note = 2'-deoxy-2'-fluorocytidine-3'-phosphate
  modified_base 16: mod_base = OTHER; note = 2'-O-methyluridine-3'-phosphate
  modified_base 17: mod_base = OTHER; note = 2'-deoxy-2'-fluorouridine-3'-phosphate
  modified_base 18: mod_base = OTHER; note = 2'-O-methylguanosine-3'-phosphate
  modified_base 19: mod_base = OTHER; note = 2'-deoxy-2'-fluorouridine-3'-phosphate
  modified_base 20: mod_base = OTHER; note = 2'-O-methylcytidine-3'-phosphate
  modified_base 21: mod_base = OTHER; note = 2'-deoxy-2'-fluorouridine-3'-phosphate ((2S,4R)-1-[29-[[2-(acetylamino)-2-deoxy-beta-D-galactopyra nosyl]oxy]-14,14-bis[[3-[[3-[[5-[[2-(acetylamino)-2-deoxy-b eta-D-galactopyranosyl]oxy]-1-oxopentyl]amino]propyl]amino] -3-oxopropoxy]methyl]-1,12,19,25-tetraoxo-16-oxa-13,20,24-t riazanonacos-1-yl]-4-hydroxy-2-pyrrolidinyl)methyl ester
gcaggaggtggcatcttgtct

SEQ ID NO: 354 - RNA, 21 nt, synthetic construct
  source 1..21: mol_type = other RNA
  modified_base 1: mod_base = OTHER; note = 2'-deoxy-2'-fluoroguanosine-3'-phosphorothioate
  modified_base 2: mod_base = OTHER; note = 2'-O-methylguanosine-3'-phosphorothioate
  modified_base 3: mod_base = OTHER; note = 2'-deoxy-2'-fluoroguanosine-3'-phosphate
  modified_base 4: mod_base = OTHER; note = 2'-O-methylcytidine-3'-phosphate
  modified_base 5: mod_base = OTHER; note = 2'-deoxy-2'-fluorocytidine-3'-phosphate
  modified_base 6: mod_base = OTHER; note = 2'-O-methyluridine-3'-phosphate
  modified_base 7: mod_base = OTHER; note = 2'-deoxy-2'-fluoroguanosine-3'-phosphate
  modified_base 8: mod_base = OTHER; note = 2'-O-methylcytidine-3'-phosphate
  modified_base 9: mod_base = OTHER; note = 2'-deoxy-2'-fluoroadenosine-3'-phosphate
  modified_base 10: mod_base = OTHER; note = 2'-deoxy-2'-fluorocytidine-3'-phosphate
  modified_base 11: mod_base = OTHER; note = 2'-deoxy-2'-fluoroadenosine-3'-phosphate
  modified_base 12: mod_base = OTHER; note = 2'-O-methylguanosine-3'-phosphate
  modified_base 13: mod_base = OTHER; note = 2'-deoxy-2'-fluorocytidine-3'-phosphate
  modified_base 14: mod_base = OTHER; note = 2'-O-methyluridine-3'-phosphate
  modified_base 15: mod_base = OTHER; note = 2'-deoxy-2'-fluoroadenosine-3'-phosphate
  modified_base 16: mod_base = OTHER; note = 2'-O-methylcytidine-3'-phosphate
  modified_base 17: mod_base = OTHER; note = 2'-deoxy-2'-fluorouridine-3'-phosphate
  modified_base 18: mod_base = OTHER; note = 2'-O-methyladenosine-3'-phosphate
  modified_base 19: mod_base = OTHER; note = 2'-deoxy-2'-fluorocytidine-3'-phosphate
  modified_base 20: mod_base = OTHER; note = 2'-O-methylguanosine-3'-phosphate
  modified_base 21: mod_base = OTHER; note = 2'-deoxy-2'-fluoroadenosine-3'-phosphate ((2S,4R)-1-[29-[[2-(acetylamino)-2-deoxy-beta-D-galactopyra nosyl]oxy]-14,14-bis[[3-[[3-[[5-[[2-(acetylamino)-2-deoxy-b eta-D-galactopyranosyl]oxy]-1-oxopentyl]amino]propyl]amino] -3-oxopropoxy]methyl]-1,12,19,25-tetraoxo-16-oxa-13,20,24-t riazanonacos-1-yl]-4-hydroxy-2-pyrrolidinyl)methyl ester
gggcctgcacagctactacga

SEQ ID NO: 355 - RNA, 21 nt, synthetic construct
  source 1..21: mol_type = other RNA
  modified_base 1: mod_base = OTHER; note = 2'-deoxy-2'-fluorocytidine-3'-phosphorothioate
  modified_base 2: mod_base = OTHER; note = 2'-O-methyladenosine-3'-phosphorothioate
  modified_base 3: mod_base = OTHER; note = 2'-deoxy-2'-fluorocytidine-3'-phosphate
  modified_base 4: mod_base = OTHER; note = 2'-O-methylcytidine-3'-phosphate
  modified_base 5: mod_base = OTHER; note = 2'-deoxy-2'-fluorouridine-3'-phosphate
  modified_base 6: mod_base = OTHER; note = 2'-O-methylcytidine-3'-phosphate
  modified_base 7: mod_base = OTHER; note = 2'-deoxy-2'-fluorocytidine-3'-phosphate
  modified_base 8: mod_base = OTHER; note = 2'-O-methylcytidine-3'-phosphate
  modified_base 9: mod_base = OTHER; note = 2'-deoxy-2'-fluoroadenosine-3'-phosphate
  modified_base 10: mod_base = OTHER; note = 2'-deoxy-2'-fluoroguanosine-3'-phosphate
  modified_base 11: mod_base = OTHER; note = 2'-deoxy-2'-fluoroadenosine-3'-phosphate
  modified_base 12: mod_base = OTHER; note = 2'-O-methyluridine-3'-phosphate
  modified_base 13: mod_base = OTHER; note = 2'-deoxy-2'-fluorocytidine-3'-phosphate
  modified_base 14: mod_base = OTHER; note = 2'-O-methyluridine-3'-phosphate
  modified_base 15: mod_base = OTHER; note = 2'-deoxy-2'-fluorocytidine-3'-phosphate
  modified_base 16: mod_base = OTHER; note = 2'-O-methylcytidine-3'-phosphate
  modified_base 17: mod_base = OTHER; note = 2'-deoxy-2'-fluorocytidine-3'-phosphate
  modified_base 18: mod_base = OTHER; note = 2'-O-methyluridine-3'-phosphate
  modified_base 19: mod_base = OTHER; note = 2'-deoxy-2'-fluorocytidine-3'-phosphate
  modified_base 20: mod_base = OTHER; note = 2'-O-methyladenosine-3'-phosphate
  modified_base 21: mod_base = OTHER; note = 2'-deoxy-2'-fluorocytidine-3'-phosphate ((2S,4R)-1-[29-[[2-(acetylamino)-2-deoxy-beta-D-galactopyra nosyl]oxy]-14,14-bis[[3-[[3-[[5-[[2-(acetylamino)-2-deoxy-b eta-D-galactopyranosyl]oxy]-1-oxopentyl]amino]propyl]amino] -3-oxopropoxy]methyl]-1,12,19,25-tetraoxo-16-oxa-13,20,24-t riazanonacos-1-yl]-4-hydroxy-2-pyrrolidinyl)methyl ester
cacctcccagatctccctcac

SEQ ID NO: 356 - RNA, 21 nt, synthetic construct
  source 1..21: mol_type = other RNA
  modified_base 1: mod_base = OTHER; note = 2'-deoxy-2'-fluoroguanosine-3'-phosphorothioate
  modified_base 2: mod_base = OTHER; note = 2'-O-methylguanosine-3'-phosphorothioate
  modified_base 3: mod_base = OTHER; note = 2'-deoxy-2'-fluorouridine-3'-phosphate
  modified_base 4: mod_base = OTHER; note = 2'-O-methylguanosine-3'-phosphate
  modified_base 5: mod_base = OTHER; note = 2'-deoxy-2'-fluorocytidine-3'-phosphate
  modified_base 6: mod_base = OTHER; note = 2'-O-methyluridine-3'-phosphate
  modified_base 7: mod_base = OTHER; note = 2'-deoxy-2'-fluoroadenosine-3'-phosphate
  modified_base 8: mod_base = OTHER; note = 2'-O-methylcytidine-3'-phosphate
  modified_base 9: mod_base = OTHER; note = 2'-deoxy-2'-fluorouridine-3'-phosphate
  modified_base 10: mod_base = OTHER; note = 2'-deoxy-2'-fluorocytidine-3'-phosphate
  modified_base 11: mod_base = OTHER; note = 2'-deoxy-2'-fluorouridine-3'-phosphate
  modified_base 12: mod_base = OTHER; note = 2'-O-methylguanosine-3'-phosphate
  modified_base 13: mod_base = OTHER; note = 2'-deoxy-2'-fluoroguanosine-3'-phosphate
  modified_base 14: mod_base = OTHER; note = 2'-O-methyluridine-3'-phosphate
  modified_base 15: mod_base = OTHER; note = 2'-deoxy-2'-fluoroadenosine-3'-phosphate
  modified_base 16: mod_base = OTHER; note = 2'-O-methyluridine-3'-phosphate
  modified_base 17: mod_base = OTHER; note = 2'-deoxy-2'-fluorouridine-3'-phosphate
  modified_base 18: mod_base = OTHER; note = 2'-O-methyluridine-3'-phosphate
  modified_base 19: mod_base = OTHER; note = 2'-deoxy-2'-fluorocytidine-3'-phosphate
  modified_base 20: mod_base = OTHER; note = 2'-O-methylcytidine-3'-phosphate
  modified_base 21: mod_base = OTHER; note = 2'-deoxy-2'-fluorouridine-3'-phosphate ((2S,4R)-1-[29-[[2-(acetylamino)-2-deoxy-beta-D-galactopyra nosyl]oxy]-14,14-bis[[3-[[3-[[5-[[2-(acetylamino)-2-deoxy-b eta-D-galactopyranosyl]oxy]-1-oxopentyl]amino]propyl]amino] -3-oxopropoxy]methyl]-1,12,19,25-tetraoxo-16-oxa-13,20,24-t riazanonacos-1-yl]-4-hydroxy-2-pyrrolidinyl)methyl ester
ggtgctactctggtatttcct

SEQ ID NO: 357 - RNA, 21 nt, synthetic construct
  source 1..21: mol_type = other RNA
  modified_base 1: mod_base = OTHER; note = 2'-deoxy-2'-fluorocytidine-3'-phosphorothioate
  modified_base 2: mod_base = OTHER; note = 2'-O-methylcytidine-3'-phosphorothioate
  modified_base 3: mod_base = OTHER; note = 2'-deoxy-2'-fluorocytidine-3'-phosphate
  modified_base 4: mod_base = OTHER; note = 2'-O-methyluridine-3'-phosphate
  modified_base 5: mod_base = OTHER; note = 2'-deoxy-2'-fluoroguanosine-3'-phosphate
  modified_base 6: mod_base = OTHER; note = 2'-O-methylguanosine-3'-phosphate
  modified_base 7: mod_base = OTHER; note = 2'-deoxy-2'-fluorouridine-3'-phosphate
  modified_base 8: mod_base = OTHER; note = 2'-O-methylcytidine-3'-phosphate
  modified_base 9: mod_base = OTHER; note = 2'-deoxy-2'-fluorouridine-3'-phosphate
  modified_base 10: mod_base = OTHER; note = 2'-deoxy-2'-fluoroadenosine-3'-phosphate
  modified_base 11: mod_base = OTHER; note = 2'-deoxy-2'-fluoroadenosine-3'-phosphate
  modified_base 12: mod_base = OTHER; note = 2'-O-methylcytidine-3'-phosphate
  modified_base 13: mod_base = OTHER; note = 2'-deoxy-2'-fluorouridine-3'-phosphate
  modified_base 14: mod_base = OTHER; note = 2'-O-methyluridine-3'-phosphate
  modified_base 15: mod_base = OTHER; note = 2'-deoxy-2'-fluoroguanosine-3'-phosphate
  modified_base 16: mod_base = OTHER; note = 2'-O-methylguanosine-3'-phosphate
  modified_base 17: mod_base = OTHER; note = 2'-deoxy-2'-fluoroguanosine-3'-phosphate
  modified_base 18: mod_base = OTHER; note = 2'-O-methyladenosine-3'-phosphate
  modified_base 19: mod_base = OTHER; note = 2'-deoxy-2'-fluorouridine-3'-phosphate
  modified_base 20: mod_base = OTHER; note = 2'-O-methylcytidine-3'-phosphate
  modified_base 21: mod_base = OTHER; note = 2'-deoxy-2'-fluorouridine-3'-phosphate ((2S,4R)-1-[29-[[2-(acetylamino)-2-deoxy-beta-D-galactopyra nosyl]oxy]-14,14-bis[[3-[[3-[[5-[[2-(acetylamino)-2-deoxy-b eta-D-galactopyranosyl]oxy]-1-oxopentyl]amino]propyl]amino] -3-oxopropoxy]methyl]-1,12,19,25-tetraoxo-16-oxa-13,20,24-t riazanonacos-1-yl]-4-hydroxy-2-pyrrolidinyl)methyl ester
ccctggtctaacttgggatct

SEQ ID NO: 358 - RNA, 21 nt, synthetic construct
  source 1..21: mol_type = other RNA
  modified_base 1: mod_base = OTHER; note = 2'-deoxy-2'-fluoroguanosine-3'-phosphorothioate
  modified_base 2: mod_base = OTHER; note = 2'-O-methylcytidine-3'-phosphorothioate
  modified_base 3: mod_base = OTHER; note = 2'-deoxy-2'-fluorouridine-3'-phosphate
  modified_base 4: mod_base = OTHER; note = 2'-O-methylguanosine-3'-phosphate
  modified_base 5: mod_base = OTHER; note = 2'-deoxy-2'-fluoroadenosine-3'-phosphate
  modified_base 6: mod_base = OTHER; note = 2'-O-methylcytidine-3'-phosphate
  modified_base 7: mod_base = OTHER; note = 2'-deoxy-2'-fluorocytidine-3'-phosphate
  modified_base 8: mod_base = OTHER; note = 2'-O-methylguanosine-3'-phosphate
  modified_base 9: mod_base = OTHER; note = 2'-deoxy-2'-fluorocytidine-3'-phosphate
  modified_base 10: mod_base = OTHER; note = 2'-deoxy-2'-fluorouridine-3'-phosphate
  modified_base 11: mod_base = OTHER; note = 2'-deoxy-2'-fluoroguanosine-3'-phosphate
  modified_base 12: mod_base = OTHER; note = 2'-O-methylguanosine-3'-phosphate
  modified_base 13: mod_base = OTHER; note = 2'-deoxy-2'-fluoroguanosine-3'-phosphate
  modified_base 14: mod_base = OTHER; note = 2'-O-methyluridine-3'-phosphate
  modified_base 15: mod_base = OTHER; note = 2'-deoxy-2'-fluoroguanosine-3'-phosphate
  modified_base 16: mod_base = OTHER; note = 2'-O-methyladenosine-3'-phosphate
  modified_base 17: mod_base = OTHER; note = 2'-deoxy-2'-fluorouridine-3'-phosphate
  modified_base 18: mod_base = OTHER; note = 2'-O-methyladenosine-3'-phosphate
  modified_base 19: mod_base = OTHER; note = 2'-deoxy-2'-fluoroadenosine-3'-phosphate
  modified_base 20: mod_base = OTHER; note = 2'-O-methylcytidine-3'-phosphate
  modified_base 21: mod_base = OTHER; note = 2'-deoxy-2'-fluoroadenosine-3'-phosphate ((2S,4R)-1-[29-[[2-(acetylamino)-2-deoxy-beta-D-galactopyra nosyl]oxy]-14,14-bis[[3-[[3-[[5-[[2-(acetylamino)-2-deoxy-b eta-D-galactopyranosyl]oxy]-1-oxopentyl]amino]propyl]amino] -3-oxopropoxy]methyl]-1,12,19,25-tetraoxo-16-oxa-13,20,24-t riazanonacos-1-yl]-4-hydroxy-2-pyrrolidinyl)methyl ester
gctgaccgctgggtgataaca

SEQ ID NO: 359 - RNA, 21 nt, synthetic construct
  source 1..21: mol_type = other RNA
  modified_base 1: mod_base = OTHER; note = 2'-deoxy-2'-fluorocytidine-3'-phosphorothioate
  modified_base 2: mod_base = OTHER; note = 2'-O-methyluridine-3'-phosphorothioate
  modified_base 3: mod_base = OTHER; note = 2'-deoxy-2'-fluoroadenosine-3'-phosphate
  modified_base 4: mod_base = OTHER; note = 2'-O-methylcytidine-3'-phosphate
  modified_base 5: mod_base = OTHER; note = 2'-deoxy-2'-fluoroadenosine-3'-phosphate
  modified_base 6: mod_base = OTHER; note = 2'-O-methylguanosine-3'-phosphate
  modified_base 7: mod_base = OTHER; note = 2'-deoxy-2'-fluoroguanosine-3'-phosphate
  modified_base 8: mod_base = OTHER; note = 2'-O-methylguanosine-3'-phosphate
  modified_base 9: mod_base = OTHER; note = 2'-deoxy-2'-fluorocytidine-3'-phosphate
  modified_base 10: mod_base = OTHER; note = 2'-deoxy-2'-fluorocytidine-3'-phosphate
  modified_base 11: mod_base = OTHER; note = 2'-deoxy-2'-fluoroguanosine-3'-phosphate
  modified_base 12: mod_base = OTHER; note = 2'-O-methyladenosine-3'-phosphate
  modified_base 13: mod_base = OTHER; note = 2'-deoxy-2'-fluoroguanosine-3'-phosphate
  modified_base 14: mod_base = OTHER; note = 2'-O-methyluridine-3'-phosphate
  modified_base 15: mod_base = OTHER; note = 2'-deoxy-2'-fluoroadenosine-3'-phosphate
  modified_base 16: mod_base = OTHER; note = 2'-O-methylcytidine-3'-phosphate
  modified_base 17: mod_base = OTHER; note = 2'-deoxy-2'-fluoroguanosine-3'-phosphate
  modified_base 18: mod_base = OTHER; note = 2'-O-methyladenosine-3'-phosphate
  modified_base 19: mod_base = OTHER; note = 2'-deoxy-2'-fluoroadenosine-3'-phosphate
  modified_base 20: mod_base = OTHER; note = 2'-O-methylguanosine-3'-phosphate
  modified_base 21: mod_base = OTHER; note = 2'-deoxy-2'-fluorouridine-3'-phosphate ((2S,4R)-1-[29-[[2-(acetylamino)-2-deoxy-beta-D-galactopyra nosyl]oxy]-14,14-bis[[3-[[3-[[5-[[2-(acetylamino)-2-deoxy-b eta-D-galactopyranosyl]oxy]-1-oxopentyl]amino]propyl]amino] -3-oxopropoxy]methyl]-1,12,19,25-tetraoxo-16-oxa-13,20,24-t riazanonacos-1-yl]-4-hydroxy-2-pyrrolidinyl)methyl ester
ctacagggccgagtacgaagt

SEQ ID NO: 360 - RNA, 21 nt, synthetic construct
  source 1..21: mol_type = other RNA
  modified_base 1: mod_base = OTHER; note = 2'-deoxy-2'-fluorocytidine-3'-phosphorothioate
  modified_base 2: mod_base = OTHER; note = 2'-O-methyluridine-3'-phosphorothioate
  modified_base 3: mod_base = OTHER; note = 2'-deoxy-2'-fluoroadenosine-3'-phosphate
  modified_base 4: mod_base = OTHER; note = 2'-O-methyladenosine-3'-phosphate
  modified_base 5: mod_base = OTHER; note = 2'-deoxy-2'-fluorocytidine-3'-phosphate
  modified_base 6: mod_base = OTHER; note = 2'-O-methyluridine-3'-phosphate
  modified_base 7: mod_base = OTHER; note = 2'-deoxy-2'-fluorouridine-3'-phosphate
  modified_base 8: mod_base = OTHER; note = 2'-O-methylguanosine-3'-phosphate
  modified_base 9: mod_base = OTHER; note = 2'-deoxy-2'-fluoroguanosine-3'-phosphate
  modified_base 10: mod_base = OTHER; note = 2'-deoxy-2'-fluoroguanosine-3'-phosphate
  modified_base 11: mod_base = OTHER; note = 2'-deoxy-2'-fluoroadenosine-3'-phosphate
  modified_base 12: mod_base = OTHER; note = 2'-O-methyluridine-3'-phosphate
  modified_base 13: mod_base = OTHER; note = 2'-deoxy-2'-fluorocytidine-3'-phosphate
  modified_base 14: mod_base = OTHER; note = 2'-O-methyluridine-3'-phosphate
  modified_base 15: mod_base = OTHER; note = 2'-deoxy-2'-fluoroguanosine-3'-phosphate
  modified_base 16: mod_base = OTHER; note = 2'-O-methylguanosine-3'-phosphate
  modified_base 17: mod_base = OTHER; note = 2'-deoxy-2'-fluoroguanosine-3'-phosphate
  modified_base 18: mod_base = OTHER; note = 2'-O-methyladenosine-3'-phosphate
  modified_base 19: mod_base = OTHER; note = 2'-deoxy-2'-fluoroadenosine-3'-phosphate
  modified_base 20: mod_base = OTHER; note = 2'-O-methyluridine-3'-phosphate
  modified_base 21: mod_base = OTHER; note = 2'-deoxy-2'-fluoroguanosine-3'-phosphate ((2S,4R)-1-[29-[[2-(acetylamino)-2-deoxy-beta-D-galactopyra nosyl]oxy]-14,14-bis[[3-[[3-[[5-[[2-(acetylamino)-2-deoxy-b eta-D-galactopyranosyl]oxy]-1-oxopentyl]amino]propyl]amino] -3-oxopropoxy]methyl]-1,12,19,25-tetraoxo-16-oxa-13,20,24-t riazanonacos-1-yl]-4-hydroxy-2-pyrrolidinyl)methyl ester
ctaacttgggatctgggaatg

SEQ ID NO: 361 - RNA, 21 nt, synthetic construct
  source 1..21: mol_type = other RNA
  modified_base 1: mod_base = OTHER; note = 2'-deoxy-2'-fluorouridine-3'-phosphorothioate
  modified_base 2: mod_base = OTHER; note = 2'-O-methylcytidine-3'-phosphorothioate
  modified_base 3: mod_base = OTHER; note = 2'-deoxy-2'-fluorocytidine-3'-phosphate
  modified_base 4: mod_base = OTHER; note = 2'-O-methylguanosine-3'-phosphate
  modified_base 5: mod_base = OTHER; note = 2'-deoxy-2'-fluoroadenosine-3'-phosphate
  modified_base 6: mod_base = OTHER; note = 2'-O-methylguanosine-3'-phosphate
  modified_base 7: mod_base = OTHER; note = 2'-deoxy-2'-fluoroguanosine-3'-phosphate
  modified_base 8: mod_base = OTHER; note = 2'-O-methylguanosine-3'-phosphate
  modified_base 9: mod_base = OTHER; note = 2'-deoxy-2'-fluorouridine-3'-phosphate
  modified_base 10: mod_base = OTHER; note = 2'-deoxy-2'-fluoroguanosine-3'-phosphate
  modified_base 11: mod_base = OTHER; note = 2'-deoxy-2'-fluoroadenosine-3'-phosphate
  modified_base 12: mod_base = OTHER; note = 2'-O-methylguanosine-3'-phosphate
  modified_base 13: mod_base = OTHER; note = 2'-deoxy-2'-fluorouridine-3'-phosphate
  modified_base 14: mod_base = OTHER; note = 2'-O-methylguanosine-3'-phosphate
  modified_base 15: mod_base = OTHER; note = 2'-deoxy-2'-fluoroguanosine-3'-phosphate
  modified_base 16: mod_base = OTHER; note = 2'-O-methylcytidine-3'-phosphate
  modified_base 17: mod_base = OTHER; note = 2'-deoxy-2'-fluorocytidine-3'-phosphate
  modified_base 18: mod_base = OTHER; note = 2'-O-methyladenosine-3'-phosphate
  modified_base 19: mod_base = OTHER; note = 2'-deoxy-2'-fluorouridine-3'-phosphate
  modified_base 20: mod_base = OTHER; note = 2'-O-methylguanosine-3'-phosphate
  modified_base 21: mod_base = OTHER; note = 2'-deoxy-2'-fluoroguanosine-3'-phosphate ((2S,4R)-1-[29-[[2-(acetylamino)-2-deoxy-beta-D-galactopyra nosyl]oxy]-14,14-bis[[3-[[3-[[5-[[2-(acetylamino)-2-deoxy-b eta-D-galactopyranosyl]oxy]-1-oxopentyl]amino]propyl]amino] -3-oxopropoxy]methyl]-1,12,19,25-tetraoxo-16-oxa-13,20,24-t riazanonacos-1-yl]-4-hydroxy-2-pyrrolidinyl)methyl ester
tccgagggtgagtggccatgg

SEQ ID NO: 362 - RNA, 21 nt, synthetic construct
  source 1..21: mol_type = other RNA
  modified_base 1: mod_base = OTHER; note = 2'-deoxy-2'-fluoroadenosine-3'-phosphorothioate
  modified_base 2: mod_base = OTHER; note = 2'-O-methylcytidine-3'-phosphorothioate
  modified_base 3: mod_base = OTHER; note = 2'-deoxy-2'-fluoroguanosine-3'-phosphate
  modified_base 4: mod_base = OTHER; note = 2'-O-methylguanosine-3'-phosphate
  modified_base 5: mod_base = OTHER; note = 2'-deoxy-2'-fluorocytidine-3'-phosphate
  modified_base 6: mod_base = OTHER; note = 2'-O-methylcytidine-3'-phosphate
  modified_base 7: mod_base = OTHER; note = 2'-deoxy-2'-fluorouridine-3'-phosphate
  modified_base 8: mod_base = OTHER; note = 2'-O-methylguanosine-3'-phosphate
  modified_base 9: mod_base = OTHER; note = 2'-deoxy-2'-fluoroguanosine-3'-phosphate
  modified_base 10: mod_base = OTHER; note = 2'-deoxy-2'-fluoroadenosine-3'-phosphate
  modified_base 11: mod_base = OTHER; note = 2'-deoxy-2'-fluorouridine-3'-phosphate
  modified_base 12: mod_base = OTHER; note = 2'-O-methylguanosine-3'-phosphate
  modified_base 13: mod_base = OTHER; note = 2'-deoxy-2'-fluoroadenosine-3'-phosphate
  modified_base 14: mod_base = OTHER; note = 2'-O-methylguanosine-3'-phosphate
  modified_base 15: mod_base = OTHER; note = 2'-deoxy-2'-fluoroadenosine-3'-phosphate
  modified_base 16: mod_base = OTHER; note = 2'-O-methylguanosine-3'-phosphate
  modified_base 17: mod_base = OTHER; note = 2'-deoxy-2'-fluoroadenosine-3'-phosphate
  modified_base 18: mod_base = OTHER; note = 2'-O-methyladenosine-3'-phosphate
  modified_base 19: mod_base = OTHER; note = 2'-deoxy-2'-fluoroadenosine-3'-phosphate
  modified_base 20: mod_base = OTHER; note = 2'-O-methylcytidine-3'-phosphate
  modified_base 21: mod_base = OTHER; note = 2'-deoxy-2'-fluorouridine-3'-phosphate ((2S,4R)-1-[29-[[2-(acetylamino)-2-deoxy-beta-D-galactopyra nosyl]oxy]-14,14-bis[[3-[[3-[[5-[[2-(acetylamino)-2-deoxy-b eta-D-galactopyranosyl]oxy]-1-oxopentyl]amino]propyl]amino] -3-oxopropoxy]methyl]-1,12,19,25-tetraoxo-16-oxa-13,20,24-t riazanonacos-1-yl]-4-hydroxy-2-pyrrolidinyl)methyl ester
acggcctggatgagagaaact

SEQ ID NO: 363 - RNA, 21 nt, synthetic construct
  source 1..21: mol_type = other RNA
  modified_base 1: mod_base = OTHER; note = 2'-deoxy-2'-fluoroguanosine-3'-phosphorothioate
  modified_base 2: mod_base = OTHER; note = 2'-O-methylguanosine-3'-phosphorothioate
  modified_base 3: mod_base = OTHER; note = 2'-deoxy-2'-fluorocytidine-3'-phosphate
  modified_base 4: mod_base = OTHER; note = 2'-O-methyladenosine-3'-phosphate
  modified_base 5: mod_base = OTHER; note = 2'-deoxy-2'-fluoroguanosine-3'-phosphate
  modified_base 6: mod_base = OTHER; note = 2'-O-methyladenosine-3'-phosphate
  modified_base 7: mod_base = OTHER; note = 2'-deoxy-2'-fluoroadenosine-3'-phosphate
  modified_base 8: mod_base = OTHER; note = 2'-O-methylguanosine-3'-phosphate
  modified_base 9: mod_base = OTHER; note = 2'-deoxy-2'-fluorouridine-3'-phosphate
  modified_base 10: mod_base = OTHER; note = 2'-deoxy-2'-fluoroadenosine-3'-phosphate
  modified_base 11: mod_base = OTHER; note = 2'-deoxy-2'-fluorouridine-3'-phosphate
  modified_base 12: mod_base = OTHER; note = 2'-O-methylguanosine-3'-phosphate
  modified_base 13: mod_base = OTHER; note = 2'-deoxy-2'-fluoroadenosine-3'-phosphate
  modified_base 14: mod_base = OTHER; note = 2'-O-methyluridine-3'-phosphate
  modified_base 15: mod_base = OTHER; note = 2'-deoxy-2'-fluorouridine-3'-phosphate
  modified_base 16: mod_base = OTHER; note = 2'-O-methyluridine-3'-phosphate
  modified_base 17: mod_base = OTHER; note = 2'-deoxy-2'-fluoroguanosine-3'-phosphate
  modified_base 18: mod_base = OTHER; note = 2'-O-methylcytidine-3'-phosphate
  modified_base 19: mod_base = OTHER; note = 2'-deoxy-2'-fluorocytidine-3'-phosphate
  modified_base 20: mod_base = OTHER; note = 2'-O-methylguanosine-3'-phosphate
  modified_base 21: mod_base = OTHER; note = 2'-deoxy-2'-fluorouridine-3'-phosphate ((2S,4R)-1-[29-[[2-(acetylamino)-2-deoxy-beta-D-galactopyra nosyl]oxy]-14,14-bis[[3-[[3-[[5-[[2-(acetylamino)-2-deoxy-b eta-D-galactopyranosyl]oxy]-1-oxopentyl]amino]propyl]amino] -3-oxopropoxy]methyl]-1,12,19,25-tetraoxo-16-oxa-13,20,24-t riazanonacos-1-yl]-4-hydroxy-2-pyrrolidinyl)methyl ester
ggcagaagtatgatttgccgt

SEQ ID NO: 364 - RNA, 21 nt, synthetic construct
  source 1..21: mol_type = other RNA
  modified_base 1: mod_base = OTHER; note = 2'-deoxy-2'-fluorocytidine-3'-phosphorothioate
  modified_base 2: mod_base = OTHER; note = 2'-O-methylcytidine-3'-phosphorothioate
  modified_base 3: mod_base = OTHER; note = 2'-deoxy-2'-fluorocytidine-3'-phosphate
  modified_base 4: mod_base = OTHER; note = 2'-O-methyladenosine-3'-phosphate
  modified_base 5: mod_base = OTHER; note = 2'-deoxy-2'-fluoroadenosine-3'-phosphate
  modified_base 6: mod_base = OTHER; note = 2'-O-methylcytidine-3'-phosphate
  modified_base 7: mod_base = OTHER; note = 2'-deoxy-2'-fluoroguanosine-3'-phosphate
  modified_base 8: mod_base = OTHER; note = 2'-O-methylguanosine-3'-phosphate
  modified_base 9: mod_base = OTHER; note = 2'-deoxy-2'-fluorocytidine-3'-phosphate
  modified_base 10: mod_base = OTHER; note = 2'-deoxy-2'-fluorocytidine-3'-phosphate
  modified_base 11: mod_base = OTHER; note = 2'-deoxy-2'-fluorouridine-3'-phosphate
  modified_base 12: mod_base = OTHER; note = 2'-O-methylguanosine-3'-phosphate
  modified_base 13: mod_base = OTHER; note = 2'-deoxy-2'-fluoroguanosine-3'-phosphate
  modified_base 14: mod_base = OTHER; note = 2'-O-methyladenosine-3'-phosphate
  modified_base 15: mod_base = OTHER; note = 2'-deoxy-2'-fluorouridine-3'-phosphate
  modified_base 16: mod_base = OTHER; note = 2'-O-methylguanosine-3'-phosphate
  modified_base 17: mod_base = OTHER; note = 2'-deoxy-2'-fluoroadenosine-3'-phosphate
  modified_base 18: mod_base = OTHER; note = 2'-O-methylguanosine-3'-phosphate
  modified_base 19: mod_base = OTHER; note = 2'-deoxy-2'-fluoroadenosine-3'-phosphate
  modified_base 20: mod_base = OTHER; note = 2'-O-methylguanosine-3'-phosphate
  modified_base 21: mod_base = OTHER; note = 2'-deoxy-2'-fluoroadenosine-3'-phosphate ((2S,4R)-1-[29-[[2-(acetylamino)-2-deoxy-beta-D-galactopyra nosyl]oxy]-14,14-bis[[3-[[3-[[5-[[2-(acetylamino)-2-deoxy-b eta-D-galactopyranosyl]oxy]-1-oxopentyl]amino]propyl]amino] -3-oxopropoxy]methyl]-1,12,19,25-tetraoxo-16-oxa-13,20,24-t riazanonacos-1-yl]-4-hydroxy-2-pyrrolidinyl)methyl ester
cccaacggcctggatgagaga

SEQ ID NO: 365 - RNA, 21 nt, synthetic construct
  source 1..21: mol_type = other RNA
  modified_base 1: mod_base = OTHER; note = 2'-deoxy-2'-fluorocytidine-3'-phosphorothioate
  modified_base 2: mod_base = OTHER; note = 2'-O-methyluridine-3'-phosphorothioate
  modified_base 3: mod_base = OTHER; note = 2'-deoxy-2'-fluoroguanosine-3'-phosphate
  modified_base 4: mod_base = OTHER; note = 2'-O-methylcytidine-3'-phosphate
  modified_base 5: mod_base = OTHER; note = 2'-deoxy-2'-fluorouridine-3'-phosphate
  modified_base 6: mod_base = OTHER; note = 2'-O-methyluridine-3'-phosphate
  modified_base 7: mod_base = OTHER; note = 2'-deoxy-2'-fluorocytidine-3'-phosphate
  modified_base 8: mod_base = OTHER; note = 2'-O-methyluridine-3'-phosphate
  modified_base 9: mod_base = OTHER; note = 2'-deoxy-2'-fluorouridine-3'-phosphate
  modified_base 10: mod_base = OTHER; note = 2'-deoxy-2'-fluorocytidine-3'-phosphate
  modified_base 11: mod_base = OTHER; note = 2'-deoxy-2'-fluorouridine-3'-phosphate
  modified_base 12: mod_base = OTHER; note = 2'-O-methylguanosine-3'-phosphate
  modified_base 13: mod_base = OTHER; note = 2'-deoxy-2'-fluoroguanosine-3'-phosphate
  modified_base 14: mod_base = OTHER; note = 2'-O-methyluridine-3'-phosphate
  modified_base 15: mod_base = OTHER; note = 2'-deoxy-2'-fluorouridine-3'-phosphate
  modified_base 16: mod_base = OTHER; note = 2'-O-methylcytidine-3'-phosphate
  modified_base 17: mod_base = OTHER; note = 2'-deoxy-2'-fluoroadenosine-3'-phosphate
  modified_base 18: mod_base = OTHER; note = 2'-O-methyluridine-3'-phosphate
  modified_base 19: mod_base = OTHER; note = 2'-deoxy-2'-fluorouridine-3'-phosphate
  modified_base 20: mod_base = OTHER; note = 2'-O-methylcytidine-3'-phosphate
  modified_base 21: mod_base = OTHER; note = 2'-deoxy-2'-fluorouridine-3'-phosphate ((2S,4R)-1-[29-[[2-(acetylamino)-2-deoxy-beta-D-galactopyra nosyl]oxy]-14,14-bis[[3-[[3-[[5-[[2-(acetylamino)-2-deoxy-b eta-D-galactopyranosyl]oxy]-1-oxopentyl]amino]propyl]amino] -3-oxopropoxy]methyl]-1,12,19,25-tetraoxo-16-oxa-13,20,24-t riazanonacos-1-yl]-4-hydroxy-2-pyrrolidinyl)methyl ester
ctgcttcttctggttcattct

SEQ ID NO: 366 - RNA, 21 nt, synthetic construct
  source 1..21: mol_type = other RNA
  modified_base 1: mod_base = OTHER; note = 2'-deoxy-2'-fluorocytidine-3'-phosphorothioate
  modified_base 2: mod_base = OTHER; note = 2'-O-methyluridine-3'-phosphorothioate
  modified_base 3: mod_base = OTHER; note = 2'-deoxy-2'-fluorouridine-3'-phosphate
  modified_base 4: mod_base = OTHER; note = 2'-O-methylcytidine-3'-phosphate
  modified_base 5: mod_base = OTHER; note = 2'-deoxy-2'-fluoroguanosine-3'-phosphate
  modified_base 6: mod_base = OTHER; note = 2'-O-methylguanosine-3'-phosphate
  modified_base 7: mod_base = OTHER; note = 2'-deoxy-2'-fluoroadenosine-3'-phosphate
  modified_base 8: mod_base = OTHER; note = 2'-O-methyladenosine-3'-phosphate
  modified_base 9: mod_base = OTHER; note = 2'-deoxy-2'-fluoroguanosine-3'-phosphate
  modified_base 10: mod_base = OTHER; note = 2'-deoxy-2'-fluorocytidine-3'-phosphate
  modified_base 11: mod_base = OTHER; note = 2'-deoxy-2'-fluorocytidine-3'-phosphate
  modified_base 12: mod_base = OTHER; note = 2'-O-methylcytidine-3'-phosphate
  modified_base 13: mod_base = OTHER; note = 2'-deoxy-2'-fluorocytidine-3'-phosphate
  modified_base 14: mod_base = OTHER; note = 2'-O-methyluridine-3'-phosphate
  modified_base 15: mod_base = OTHER; note = 2'-deoxy-2'-fluoroguanosine-3'-phosphate
  modified_base 16: mod_base = OTHER; note = 2'-O-methylguanosine-3'-phosphate
  modified_base 17: mod_base = OTHER; note = 2'-deoxy-2'-fluorouridine-3'-phosphate
  modified_base 18: mod_base = OTHER; note = 2'-O-methylcytidine-3'-phosphate
  modified_base 19: mod_base = OTHER; note = 2'-deoxy-2'-fluorouridine-3'-phosphate
  modified_base 20: mod_base = OTHER; note = 2'-O-methyladenosine-3'-phosphate
  modified_base 21: mod_base = OTHER; note = 2'-deoxy-2'-fluoroadenosine-3'-phosphate ((2S,4R)-1-[29-[[2-(acetylamino)-2-deoxy-beta-D-galactopyra nosyl]oxy]-14,14-bis[[3-[[3-[[5-[[2-(acetylamino)-2-deoxy-b eta-D-galactopyranosyl]oxy]-1-oxopentyl]amino]propyl]amino] -3-oxopropoxy]methyl]-1,12,19,25-tetraoxo-16-oxa-13,20,24-t riazanonacos-1-yl]-4-hydroxy-2-pyrrolidinyl)methyl ester
cttcggaagcccctggtctaa

SEQ ID NO: 367 - RNA, 21 nt, synthetic construct
  source 1..21: mol_type = other RNA
  modified_base 1: mod_base = OTHER; note = 2'-deoxy-2'-fluorocytidine-3'-phosphorothioate
  modified_base 2: mod_base = OTHER; note = 2'-O-methyladenosine-3'-phosphorothioate
  modified_base 3: mod_base = OTHER; note = 2'-deoxy-2'-fluoroguanosine-3'-phosphate
  modified_base 4: mod_base = OTHER; note = 2'-O-methyladenosine-3'-phosphate
  modified_base 5: mod_base = OTHER; note = 2'-deoxy-2'-fluoroadenosine-3'-phosphate
  modified_base 6: mod_base = OTHER; note = 2'-O-methylcytidine-3'-phosphate
  modified_base 7: mod_base = OTHER; note = 2'-deoxy-2'-fluoroadenosine-3'-phosphate
  modified_base 8: mod_base = OTHER; note = 2'-O-methylguanosine-3'-phosphate
  modified_base 9: mod_base = OTHER; note = 2'-deoxy-2'-fluoroguanosine-3'-phosphate
  modified_base 10: mod_base = OTHER; note = 2'-deoxy-2'-fluoroadenosine-3'-phosphate
  modified_base 11: mod_base = OTHER; note = 2'-deoxy-2'-fluoroguanosine-3'-phosphate
  modified_base 12: mod_base = OTHER; note = 2'-O-methylguanosine-3'-phosphate
  modified_base 13: mod_base = OTHER; note = 2'-deoxy-2'-fluorocytidine-3'-phosphate
  modified_base 14: mod_base = OTHER; note = 2'-O-methyluridine-3'-phosphate
  modified_base 15: mod_base = OTHER; note = 2'-deoxy-2'-fluoroguanosine-3'-phosphate
  modified_base 16: mod_base = OTHER; note = 2'-O-methyluridine-3'-phosphate
  modified_base 17: mod_base = OTHER; note = 2'-deoxy-2'-fluoroguanosine-3'-phosphate
  modified_base 18: mod_base = OTHER; note = 2'-O-methyluridine-3'-phosphate
  modified_base 19: mod_base = OTHER; note = 2'-deoxy-2'-fluoroguanosine-3'-phosphate
  modified_base 20: mod_base = OTHER; note = 2'-O-methylguanosine-3'-phosphate
  modified_base 21: mod_base = OTHER; note = 2'-deoxy-2'-fluorocytidine-3'-phosphate ((2S,4R)-1-[29-[[2-(acetylamino)-2-deoxy-beta-D-galactopyra nosyl]oxy]-14,14-bis[[3-[[3-[[5-[[2-(acetylamino)-2-deoxy-b eta-D-galactopyranosyl]oxy]-1-oxopentyl]amino]propyl]amino] -3-oxopropoxy]methyl]-1,12,19,25-tetraoxo-16-oxa-13,20,24-t riazanonacos-1-yl]-4-hydroxy-2-pyrrolidinyl)methyl ester
cagaacaggaggctgtgtggc

SEQ ID NO: 368 - RNA, 21 nt, synthetic construct
  source 1..21: mol_type = other RNA
  modified_base 1: mod_base = OTHER; note = 2'-deoxy-2'-fluorocytidine-3'-phosphorothioate
  modified_base 2: mod_base = OTHER; note = 2'-O-methylguanosine-3'-phosphorothioate
  modified_base 3: mod_base = OTHER; note = 2'-deoxy-2'-fluorocytidine-3'-phosphate
  modified_base 4: mod_base = OTHER; note = 2'-O-methylcytidine-3'-phosphate
  modified_base 5: mod_base = OTHER; note = 2'-deoxy-2'-fluoroadenosine-3'-phosphate
  modified_base 6: mod_base = OTHER; note = 2'-O-methylcytidine-3'-phosphate
  modified_base 7: mod_base = OTHER; note = 2'-deoxy-2'-fluorouridine-3'-phosphate
  modified_base 8: mod_base = OTHER; note = 2'-O-methyluridine-3'-phosphate
  modified_base 9: mod_base = OTHER; note = 2'-deoxy-2'-fluorocytidine-3'-phosphate
  modified_base 10: mod_base = OTHER; note = 2'-deoxy-2'-fluorouridine-3'-phosphate
  modified_base 11: mod_base = OTHER; note = 2'-deoxy-2'-fluorocytidine-3'-phosphate
  modified_base 12: mod_base = OTHER; note = 2'-O-methylcytidine-3'-phosphate
  modified_base 13: mod_base = OTHER; note = 2'-deoxy-2'-fluorocytidine-3'-phosphate
  modified_base 14: mod_base = OTHER; note = 2'-O-methyladenosine-3'-phosphate
  modified_base 15: mod_base = OTHER; note = 2'-deoxy-2'-fluoroguanosine-3'-phosphate
  modified_base 16: mod_base = OTHER; note = 2'-O-methylguanosine-3'-phosphate
  modified_base 17: mod_base = OTHER; note = 2'-deoxy-2'-fluoroadenosine-3'-phosphate
  modified_base 18: mod_base = OTHER; note = 2'-O-methyluridine-3'-phosphate
  modified_base 19: mod_base = OTHER; note = 2'-deoxy-2'-fluorocytidine-3'-phosphate
  modified_base 20: mod_base = OTHER; note = 2'-O-methyluridine-3'-phosphate
  modified_base 21: mod_base = OTHER; note = 2'-deoxy-2'-fluorouridine-3'-phosphate ((2S,4R)-1-[29-[[2-(acetylamino)-2-deoxy-beta-D-galactopyra nosyl]oxy]-14,14-bis[[3-[[3-[[5-[[2-(acetylamino)-2-deoxy-b eta-D-galactopyranosyl]oxy]-1-oxopentyl]amino]propyl]amino] -3-oxopropoxy]methyl]-1,12,19,25-tetraoxo-16-oxa-13,20,24-t riazanonacos-1-yl]-4-hydroxy-2-pyrrolidinyl)methyl ester
cgccacttctcccaggatctt

SEQ ID NO: 369 - RNA, 21 nt, synthetic construct
  source 1..21: mol_type = other RNA
  modified_base 1: mod_base = OTHER; note = 2'-deoxy-2'-fluoroguanosine-3'-phosphorothioate
  modified_base 2: mod_base = OTHER; note = 2'-O-methylcytidine-3'-phosphorothioate
  modified_base 3: mod_base = OTHER; note = 2'-deoxy-2'-fluorocytidine-3'-phosphate
  modified_base 4: mod_base = OTHER; note = 2'-O-methyladenosine-3'-phosphate
  modified_base 5: mod_base = OTHER; note = 2'-deoxy-2'-fluoroguanosine-3'-phosphate
  modified_base 6: mod_base = OTHER; note = 2'-O-methyluridine-3'-phosphate
  modified_base 7: mod_base = OTHER; note = 2'-deoxy-2'-fluoroguanosine-3'-phosphate
  modified_base 8: mod_base = OTHER; note = 2'-O-methyluridine-3'-phosphate
  modified_base 9: mod_base = OTHER; note = 2'-deoxy-2'-fluoroguanosine-3'-phosphate
  modified_base 10: mod_base = OTHER; note = 2'-deoxy-2'-fluoroadenosine-3'-phosphate
  modified_base 11: mod_base = OTHER; note = 2'-deoxy-2'-fluoroadenosine-3'-phosphate
  modified_base 12: mod_base = OTHER; note = 2'-O-methyladenosine-3'-phosphate
  modified_base 13: mod_base = OTHER; note = 2'-deoxy-2'-fluoroguanosine-3'-phosphate
  modified_base 14: mod_base = OTHER; note = 2'-O-methyladenosine-3'-phosphate
  modified_base 15: mod_base = OTHER; note = 2'-deoxy-2'-fluorocytidine-3'-phosphate
  modified_base 16: mod_base = OTHER; note = 2'-O-methyladenosine-3'-phosphate
  modified_base 17: mod_base = OTHER; note = 2'-deoxy-2'-fluorouridine-3'-phosphate
  modified_base 18: mod_base = OTHER; note = 2'-O-methyladenosine-3'-phosphate
  modified_base 19: mod_base = OTHER; note = 2'-deoxy-2'-fluoroguanosine-3'-phosphate
  modified_base 20: mod_base = OTHER; note = 2'-O-methylcytidine-3'-phosphate
  modified_base 21: mod_base = OTHER; note = 2'-deoxy-2'-fluorouridine-3'-phosphate ((2S,4R)-1-[29-[[2-(acetylamino)-2-deoxy-beta-D-galactopyra nosyl]oxy]-14,14-bis[[3-[[3-[[5-[[2-(acetylamino)-2-deoxy-b eta-D-galactopyranosyl]oxy]-1-oxopentyl]amino]propyl]amino] -3-oxopropoxy]methyl]-1,12,19,25-tetraoxo-16-oxa-13,20,24-t riazanonacos-1-yl]-4-hydroxy-2-pyrrolidinyl)methyl ester
gccagtgtgaaagacatagct

SEQ ID NO: 370 - RNA, 21 nt, synthetic construct
  source 1..21: mol_type = other RNA
  modified_base 1: mod_base = OTHER; note = 2'-deoxy-2'-fluorocytidine-3'-phosphorothioate
  modified_base 2: mod_base = OTHER; note = 2'-O-methyladenosine-3'-phosphorothioate
  modified_base 3: mod_base = OTHER; note = 2'-deoxy-2'-fluoroadenosine-3'-phosphate
  modified_base 4: mod_base = OTHER; note = 2'-O-methylguanosine-3'-phosphate
  modified_base 5: mod_base = OTHER; note = 2'-deoxy-2'-fluorocytidine-3'-phosphate
  modified_base 6: mod_base = OTHER; note = 2'-O-methyladenosine-3'-phosphate
  modified_base 7: mod_base = OTHER; note = 2'-deoxy-2'-fluoroguanosine-3'-phosphate
  modified_base 8: mod_base = OTHER; note = 2'-O-methylguanosine-3'-phosphate
  modified_base 9: mod_base = OTHER; note = 2'-deoxy-2'-fluoroguanosine-3'-phosphate
  modified_base 10: mod_base = OTHER; note = 2'-deoxy-2'-fluoroguanosine-3'-phosphate
  modified_base 11: mod_base = OTHER; note = 2'-deoxy-2'-fluoroguanosine-3'-phosphate
  modified_base 12: mod_base = OTHER; note = 2'-O-methyladenosine-3'-phosphate
  modified_base 13: mod_base = OTHER; note = 2'-deoxy-2'-fluorocytidine-3'-phosphate
  modified_base 14: mod_base = OTHER; note = 2'-O-methyladenosine-3'-phosphate
  modified_base 15: mod_base = OTHER; note = 2'-deoxy-2'-fluoroadenosine-3'-phosphate
  modified_base 16: mod_base = OTHER; note = 2'-O-methylguanosine-3'-phosphate
  modified_base 17: mod_base = OTHER; note = 2'-deoxy-2'-fluorouridine-3'-phosphate
  modified_base 18: mod_base = OTHER; note = 2'-O-methyladenosine-3'-phosphate
  modified_base 19: mod_base = OTHER; note = 2'-deoxy-2'-fluorouridine-3'-phosphate
  modified_base 20: mod_base = OTHER; note = 2'-O-methyluridine-3'-phosphate
  modified_base 21: mod_base = OTHER; note = 2'-deoxy-2'-fluorocytidine-3'-phosphate ((2S,4R)-1-[29-[[2-(acetylamino)-2-deoxy-beta-D-galactopyra nosyl]oxy]-14,14-bis[[3-[[3-[[5-[[2-(acetylamino)-2-deoxy-b eta-D-galactopyranosyl]oxy]-1-oxopentyl]amino]propyl]amino] -3-oxopropoxy]methyl]-1,12,19,25-tetraoxo-16-oxa-13,20,24-t riazanonacos-1-yl]-4-hydroxy-2-pyrrolidinyl)methyl ester
caagcagggggacaagtattc

SEQ ID NO: 371 - RNA, 21 nt, synthetic construct
  source 1..21: mol_type = other RNA
  modified_base 1: mod_base = OTHER; note = 2'-deoxy-2'-fluorocytidine-3'-phosphorothioate
  modified_base 2: mod_base = OTHER; note = 2'-O-methylcytidine-3'-phosphorothioate
  modified_base 3: mod_base = OTHER; note = 2'-deoxy-2'-fluorouridine-3'-phosphate
  modified_base 4: mod_base = OTHER; note = 2'-O-methylguanosine-3'-phosphate
  modified_base 5: mod_base = OTHER; note = 2'-deoxy-2'-fluorouridine-3'-phosphate
  modified_base 6: mod_base = OTHER; note = 2'-O-methylguanosine-3'-phosphate
  modified_base 7: mod_base = OTHER; note = 2'-deoxy-2'-fluoroadenosine-3'-phosphate
  modified_base 8: mod_base = OTHER; note = 2'-O-methyluridine-3'-phosphate
  modified_base 9: mod_base = OTHER; note = 2'-deoxy-2'-fluoroguanosine-3'-phosphate
  modified_base 10: mod_base = OTHER; note = 2'-deoxy-2'-fluoroguanosine-3'-phosphate
  modified_base 11: mod_base = OTHER; note = 2'-deoxy-2'-fluoroguanosine-3'-phosphate
  modified_base 12: mod_base = OTHER; note = 2'-O-methylguanosine-3'-phosphate
  modified_base 13: mod_base = OTHER; note = 2'-deoxy-2'-fluorouridine-3'-phosphate
  modified_base 14: mod_base = OTHER; note = 2'-O-methylcytidine-3'-phosphate
  modified_base 15: mod_base = OTHER; note = 2'-deoxy-2'-fluoroadenosine-3'-phosphate
  modified_base 16: mod_base = OTHER; note = 2'-O-methyladenosine-3'-phosphate
  modified_base 17: mod_base = OTHER; note = 2'-deoxy-2'-fluoroguanosine-3'-phosphate
  modified_base 18: mod_base = OTHER; note = 2'-O-methylguanosine-3'-phosphate
  modified_base 19: mod_base = OTHER; note = 2'-deoxy-2'-fluoroadenosine-3'-phosphate
  modified_base 20: mod_base = OTHER; note = 2'-O-methylcytidine-3'-phosphate
  modified_base 21: mod_base = OTHER; note = 2'-deoxy-2'-fluorouridine-3'-phosphate ((2S,4R)-1-[29-[[2-(acetylamino)-2-deoxy-beta-D-galactopyra nosyl]oxy]-14,14-bis[[3-[[3-[[5-[[2-(acetylamino)-2-deoxy-b eta-D-galactopyranosyl]oxy]-1-oxopentyl]amino]propyl]amino] -3-oxopropoxy]methyl]-1,12,19,25-tetraoxo-16-oxa-13,20,24-t riazanonacos-1-yl]-4-hydroxy-2-pyrrolidinyl)methyl ester
cctgtgatggggtcaaggact

SEQ ID NO: 372 - RNA, 21 nt, synthetic construct
  source 1..21: mol_type = other RNA
  modified_base 1: mod_base = OTHER; note = 2'-deoxy-2'-fluoroadenosine-3'-phosphorothioate
  modified_base 2: mod_base = OTHER; note = 2'-O-methylguanosine-3'-phosphorothioate
  modified_base 3: mod_base = OTHER; note = 2'-deoxy-2'-fluorouridine-3'-phosphate
  modified_base 4: mod_base = OTHER; note = 2'-O-methylguanosine-3'-phosphate
  modified_base 5: mod_base = OTHER; note = 2'-deoxy-2'-fluorouridine-3'-phosphate
  modified_base 6: mod_base = OTHER; note = 2'-O-methylguanosine-3'-phosphate
  modified_base 7: mod_base = OTHER; note = 2'-deoxy-2'-fluoroadenosine-3'-phosphate
  modified_base 8: mod_base = OTHER; note = 2'-O-methyladenosine-3'-phosphate
  modified_base 9: mod_base = OTHER; note = 2'-deoxy-2'-fluoroadenosine-3'-phosphate
  modified_base 10: mod_base = OTHER; note = 2'-deoxy-2'-fluoroguanosine-3'-phosphate
  modified_base 11: mod_base = OTHER; note = 2'-deoxy-2'-fluoroadenosine-3'-phosphate
  modified_base 12: mod_base = OTHER; note = 2'-O-methylcytidine-3'-phosphate
  modified_base 13: mod_base = OTHER; note = 2'-deoxy-2'-fluoroadenosine-3'-phosphate
  modified_base 14: mod_base = OTHER; note = 2'-O-methyluridine-3'-phosphate
  modified_base 15: mod_base = OTHER; note = 2'-deoxy-2'-fluoroadenosine-3'-phosphate
  modified_base 16: mod_base = OTHER; note = 2'-O-methylguanosine-3'-phosphate
  modified_base 17: mod_base = OTHER; note = 2'-deoxy-2'-fluorocytidine-3'-phosphate
  modified_base 18: mod_base = OTHER; note = 2'-O-methyluridine-3'-phosphate
  modified_base 19: mod_base = OTHER; note = 2'-deoxy-2'-fluoroguanosine-3'-phosphate
  modified_base 20: mod_base = OTHER; note = 2'-O-methylcytidine-3'-phosphate
  modified_base 21: mod_base = OTHER; note = 2'-deoxy-2'-fluoroadenosine-3'-phosphate ((2S,4R)-1-[29-[[2-(acetylamino)-2-deoxy-beta-D-galactopyra nosyl]oxy]-14,14-bis[[3-[[3-[[5-[[2-(acetylamino)-2-deoxy-b eta-D-galactopyranosyl]oxy]-1-oxopentyl]amino]propyl]amino] -3-oxopropoxy]methyl]-1,12,19,25-tetraoxo-16-oxa-13,20,24-t riazanonacos-1-yl]-4-hydroxy-2-pyrrolidinyl)methyl ester
agtgtgaaagacatagctgca

SEQ ID NO: 373 - RNA, 21 nt, synthetic construct
  source 1..21: mol_type = other RNA
  modified_base 1: mod_base = OTHER; note = 2'-deoxy-2'-fluoroguanosine-3'-phosphorothioate
  modified_base 2: mod_base = OTHER; note = 2'-O-methyluridine-3'-phosphorothioate
  modified_base 3: mod_base = OTHER; note = 2'-deoxy-2'-fluorocytidine-3'-phosphate
  modified_base 4: mod_base = OTHER; note = 2'-O-methylcytidine-3'-phosphate
  modified_base 5: mod_base = OTHER; note = 2'-deoxy-2'-fluorouridine-3'-phosphate
  modified_base 6: mod_base = OTHER; note = 2'-O-methylcytidine-3'-phosphate
  modified_base 7: mod_base = OTHER; note = 2'-deoxy-2'-fluorocytidine-3'-phosphate
  modified_base 8: mod_base = OTHER; note = 2'-O-methylguanosine-3'-phosphate
  modified_base 9: mod_base = OTHER; note = 2'-deoxy-2'-fluoroadenosine-3'-phosphate
  modified_base 10: mod_base = OTHER; note = 2'-deoxy-2'-fluoroguanosine-3'-phosphate
  modified_base 11: mod_base = OTHER; note = 2'-deoxy-2'-fluoroguanosine-3'-phosphate
  modified_base 12: mod_base = OTHER; note = 2'-O-methylguanosine-3'-phosphate
  modified_base 13: mod_base = OTHER; note = 2'-deoxy-2'-fluorouridine-3'-phosphate
  modified_base 14: mod_base = OTHER; note = 2'-O-methylguanosine-3'-phosphate
  modified_base 15: mod_base = OTHER; note = 2'-deoxy-2'-fluoroadenosine-3'-phosphate
  modified_base 16: mod_base = OTHER; note = 2'-O-methylguanosine-3'-phosphate
  modified_base 17: mod_base = OTHER; note = 2'-deoxy-2'-fluorouridine-3'-phosphate
  modified_base 18: mod_base = OTHER; note = 2'-O-methylguanosine-3'-phosphate
  modified_base 19: mod_base = OTHER; note = 2'-deoxy-2'-fluoroguanosine-3'-phosphate
  modified_base 20: mod_base = OTHER; note = 2'-O-methylcytidine-3'-phosphate
  modified_base 21: mod_base = OTHER; note = 2'-deoxy-2'-fluorocytidine-3'-phosphate ((2S,4R)-1-[29-[[2-(acetylamino)-2-deoxy-beta-D-galactopyra nosyl]oxy]-14,14-bis[[3-[[3-[[5-[[2-(acetylamino)-2-deoxy-b eta-D-galactopyranosyl]oxy]-1-oxopentyl]amino]propyl]amino] -3-oxopropoxy]methyl]-1,12,19,25-tetraoxo-16-oxa-13,20,24-t riazanonacos-1-yl]-4-hydroxy-2-pyrrolidinyl)methyl ester
gtcctccgagggtgagtggcc

SEQ ID NO: 374 - RNA, 21 nt, synthetic construct
  source 1..21: mol_type = other RNA
  modified_base 1: mod_base = OTHER; note = 2'-deoxy-2'-fluorouridine-3'-phosphorothioate
  modified_base 2: mod_base = OTHER; note = 2'-O-methylguanosine-3'-phosphorothioate
  modified_base 3: mod_base = OTHER; note = 2'-deoxy-2'-fluoroguanosine-3'-phosphate
  modified_base 4: mod_base = OTHER; note = 2'-O-methylcytidine-3'-phosphate
  modified_base 5: mod_base = OTHER; note = 2'-deoxy-2'-fluoroadenosine-3'-phosphate
  modified_base 6: mod_base = OTHER; note = 2'-O-methylguanosine-3'-phosphate
  modified_base 7: mod_base = OTHER; note = 2'-deoxy-2'-fluoroguanosine-3'-phosphate
  modified_base 8: mod_base = OTHER; note = 2'-O-methyladenosine-3'-phosphate
  modified_base 9: mod_base = OTHER; note = 2'-deoxy-2'-fluoroguanosine-3'-phosphate
  modified_base 10: mod_base = OTHER; note = 2'-deoxy-2'-fluoroguanosine-3'-phosphate
  modified_base 11: mod_base = OTHER; note = 2'-deoxy-2'-fluorouridine-3'-phosphate
  modified_base 12: mod_base = OTHER; note = 2'-O-methylguanosine-3'-phosphate
  modified_base 13: mod_base = OTHER; note = 2'-deoxy-2'-fluoroguanosine-3'-phosphate
  modified_base 14: mod_base = OTHER; note = 2'-O-methylcytidine-3'-phosphate
  modified_base 15: mod_base = OTHER; note = 2'-deoxy-2'-fluoroadenosine-3'-phosphate
  modified_base 16: mod_base = OTHER; note = 2'-O-methyluridine-3'-phosphate
  modified_base 17: mod_base = OTHER; note = 2'-deoxy-2'-fluorocytidine-3'-phosphate
  modified_base 18: mod_base = OTHER; note = 2'-O-methyluridine-3'-phosphate
  modified_base 19: mod_base = OTHER; note = 2'-deoxy-2'-fluorouridine-3'-phosphate
  modified_base 20: mod_base = OTHER; note = 2'-O-methylguanosine-3'-phosphate
  modified_base 21: mod_base = OTHER; note = 2'-deoxy-2'-fluorouridine-3'-phosphate ((2S,4R)-1-[29-[[2-(acetylamino)-2-deoxy-beta-D-galactopyra nosyl]oxy]-14,14-bis[[3-[[3-[[5-[[2-(acetylamino)-2-deoxy-b eta-D-galactopyranosyl]oxy]-1-oxopentyl]amino]propyl]amino] -3-oxopropoxy]methyl]-1,12,19,25-tetraoxo-16-oxa-13,20,24-t riazanonacos-1-yl]-4-hydroxy-2-pyrrolidinyl)methyl ester
tggcaggaggtggcatcttgt

SEQ ID NO: 375 - RNA, 21 nt, synthetic construct
  source 1..21: mol_type = other RNA
  modified_base 1: mod_base = OTHER; note = 2'-deoxy-2'-fluorocytidine-3'-phosphorothioate
  modified_base 2: mod_base = OTHER; note = 2'-O-methylguanosine-3'-phosphorothioate
  modified_base 3: mod_base = OTHER; note = 2'-deoxy-2'-fluoroguanosine-3'-phosphate
  modified_base 4: mod_base = OTHER; note = 2'-O-methylguanosine-3'-phosphate
  modified_base 5: mod_base = OTHER; note = 2'-deoxy-2'-fluoroadenosine-3'-phosphate
  modified_base 6: mod_base = OTHER; note = 2'-O-methylcytidine-3'-phosphate
  modified_base 7: mod_base = OTHER; note = 2'-deoxy-2'-fluorocytidine-3'-phosphate
  modified_base 8: mod_base = OTHER; note = 2'-O-methylguanosine-3'-phosphate
  modified_base 9: mod_base = OTHER; note = 2'-deoxy-2'-fluoroadenosine-3'-phosphate
  modified_base 10: mod_base = OTHER; note = 2'-deoxy-2'-fluorocytidine-3'-phosphate
  modified_base 11: mod_base = OTHER; note = 2'-deoxy-2'-fluorouridine-3'-phosphate
  modified_base 12: mod_base = OTHER; note = 2'-O-methylguanosine-3'-phosphate
  modified_base 13: mod_base = OTHER; note = 2'-deoxy-2'-fluoroguanosine-3'-phosphate
  modified_base 14: mod_base = OTHER; note = 2'-O-methylcytidine-3'-phosphate
  modified_base 15: mod_base = OTHER; note = 2'-deoxy-2'-fluorocytidine-3'-phosphate
  modified_base 16: mod_base = OTHER; note = 2'-O-methyladenosine-3'-phosphate
  modified_base 17: mod_base = OTHER; note = 2'-deoxy-2'-fluorouridine-3'-phosphate
  modified_base 18: mod_base = OTHER; note = 2'-O-methylguanosine-3'-phosphate
  modified_base 19: mod_base = OTHER; note = 2'-deoxy-2'-fluorouridine-3'-phosphate
  modified_base 20: mod_base = OTHER; note = 2'-O-methyladenosine-3'-phosphate
  modified_base 21: mod_base = OTHER; note = 2'-deoxy-2'-fluorouridine-3'-phosphate ((2S,4R)-1-[29-[[2-(acetylamino)-2-deoxy-beta-D-galactopyra nosyl]oxy]-14,14-bis[[3-[[3-[[5-[[2-(acetylamino)-2-deoxy-b eta-D-galactopyranosyl]oxy]-1-oxopentyl]amino]propyl]amino] -3-oxopropoxy]methyl]-1,12,19,25-tetraoxo-16-oxa-13,20,24-t riazanonacos-1-yl]-4-hydroxy-2-pyrrolidinyl)methyl ester
cgggaccgactggccatgtat

SEQ ID NO: 376 - RNA, 21 nt, synthetic construct
  source 1..21: mol_type = other RNA
  modified_base 1: mod_base = OTHER; note = 2'-deoxy-2'-fluorocytidine-3'-phosphorothioate
  modified_base 2: mod_base = OTHER; note = 2'-O-methylcytidine-3'-phosphorothioate
  modified_base 3: mod_base = OTHER; note = 2'-deoxy-2'-fluorocytidine-3'-phosphate
  modified_base 4: mod_base = OTHER; note = 2'-O-methyluridine-3'-phosphate
  modified_base 5: mod_base = OTHER; note = 2'-deoxy-2'-fluoroadenosine-3'-phosphate
  modified_base 6: mod_base = OTHER; note = 2'-O-methylcytidine-3'-phosphate
  modified_base 7: mod_base = OTHER; note = 2'-deoxy-2'-fluoroadenosine-3'-phosphate
  modified_base 8: mod_base = OTHER; note = 2'-O-methylguanosine-3'-phosphate
  modified_base 9: mod_base = OTHER; note = 2'-deoxy-2'-fluoroguanosine-3'-phosphate
  modified_base 10: mod_base = OTHER; note = 2'-deoxy-2'-fluoroguanosine-3'-phosphate
  modified_base 11: mod_base = OTHER; note = 2'-deoxy-2'-fluorocytidine-3'-phosphate
  modified_base 12: mod_base = OTHER; note = 2'-O-methylcytidine-3'-phosphate
  modified_base 13: mod_base = OTHER; note = 2'-deoxy-2'-fluoroguanosine-3'-phosphate
  modified_base 14: mod_base = OTHER; note = 2'-O-methyladenosine-3'-phosphate
  modified_base 15: mod_base = OTHER; note = 2'-deoxy-2'-fluoroguanosine-3'-phosphate
  modified_base 16: mod_base = OTHER; note = 2'-O-methyluridine-3'-phosphate
  modified_base 17: mod_base = OTHER; note = 2'-deoxy-2'-fluoroadenosine-3'-phosphate
  modified_base 18: mod_base = OTHER; note = 2'-O-methylcytidine-3'-phosphate
  modified_base 19: mod_base = OTHER; note = 2'-deoxy-2'-fluoroguanosine-3'-phosphate
  modified_base 20: mod_base = OTHER; note = 2'-O-methyladenosine-3'-phosphate
  modified_base 21: mod_base = OTHER; note = 2'-deoxy-2'-fluoroadenosine-3'-phosphate ((2S,4R)-1-[29-[[2-(acetylamino)-2-deoxy-beta-D-galactopyra nosyl]oxy]-14,14-bis[[3-[[3-[[5-[[2-(acetylamino)-2-deoxy-b eta-D-galactopyranosyl]oxy]-1-oxopentyl]amino]propyl]amino] -3-oxopropoxy]methyl]-1,12,19,25-tetraoxo-16-oxa-13,20,24-t riazanonacos-1-yl]-4-hydroxy-2-pyrrolidinyl)methyl ester
ccctacagggccgagtacgaa

SEQ ID NO: 377 - RNA, 21 nt, synthetic construct
  source 1..21: mol_type = other RNA
  modified_base 1: mod_base = OTHER; note = 2'-deoxy-2'-fluoroguanosine-3'-phosphorothioate
  modified_base 2: mod_base = OTHER; note = 2'-O-methylcytidine-3'-phosphorothioate
  modified_base 3: mod_base = OTHER; note = 2'-deoxy-2'-fluorouridine-3'-phosphate
  modified_base 4: mod_base = OTHER; note = 2'-O-methyluridine-3'-phosphate
  modified_base 5: mod_base = OTHER; note = 2'-deoxy-2'-fluorocytidine-3'-phosphate
  modified_base 6: mod_base = OTHER; note = 2'-O-methylguanosine-3'-phosphate
  modified_base 7: mod_base = OTHER; note = 2'-deoxy-2'-fluoroguanosine-3'-phosphate
  modified_base 8: mod_base = OTHER; note = 2'-O-methyladenosine-3'-phosphate
  modified_base 9: mod_base = OTHER; note = 2'-deoxy-2'-fluoroadenosine-3'-phosphate
  modified_base 10: mod_base = OTHER; note = 2'-deoxy-2'-fluoroguanosine-3'-phosphate
  modified_base 11: mod_base = OTHER; note = 2'-deoxy-2'-fluorocytidine-3'-phosphate
  modified_base 12: mod_base = OTHER; note = 2'-O-methylcytidine-3'-phosphate
  modified_base 13: mod_base = OTHER; note = 2'-deoxy-2'-fluorocytidine-3'-phosphate
  modified_base 14: mod_base = OTHER; note = 2'-O-methylcytidine-3'-phosphate
  modified_base 15: mod_base = OTHER; note = 2'-deoxy-2'-fluorouridine-3'-phosphate
  modified_base 16: mod_base = OTHER; note = 2'-O-methylguanosine-3'-phosphate
  modified_base 17: mod_base = OTHER; note = 2'-deoxy-2'-fluoroguanosine-3'-phosphate
  modified_base 18: mod_base = OTHER; note = 2'-O-methyluridine-3'-phosphate
  modified_base 19: mod_base = OTHER; note = 2'-deoxy-2'-fluorocytidine-3'-phosphate
  modified_base 20: mod_base = OTHER; note = 2'-O-methyluridine-3'-phosphate
  modified_base 21: mod_base = OTHER; note = 2'-deoxy-2'-fluoroadenosine-3'-phosphate ((2S,4R)-1-[29-[[2-(acetylamino)-2-deoxy-beta-D-galactopyra nosyl]oxy]-14,14-bis[[3-[[3-[[5-[[2-(acetylamino)-2-deoxy-b eta-D-galactopyranosyl]oxy]-1-oxopentyl]amino]propyl]amino] -3-oxopropoxy]methyl]-1,12,19,25-tetraoxo-16-oxa-13,20,24-t riazanonacos-1-yl]-4-hydroxy-2-pyrrolidinyl)methyl ester
gcttcggaagcccctggtcta

SEQ ID NO: 378 - RNA, 21 nt, synthetic construct
  source 1..21: mol_type = other RNA
  modified_base 1: mod_base = OTHER; note = 2'-deoxy-2'-fluoroadenosine-3'-phosphorothioate
  modified_base 2: mod_base = OTHER; note = 2'-O-methylguanosine-3'-phosphorothioate
  modified_base 3: mod_base = OTHER; note = 2'-deoxy-2'-fluoroguanosine-3'-phosphate
  modified_base 4: mod_base = OTHER; note = 2'-O-methyluridine-3'-phosphate
  modified_base 5: mod_base = OTHER; note = 2'-deoxy-2'-fluorouridine-3'-phosphate
  modified_base 6: mod_base = OTHER; note = 2'-O-methylcytidine-3'-phosphate
  modified_base 7: mod_base = OTHER; note = 2'-deoxy-2'-fluoroguanosine-3'-phosphate
  modified_base 8: mod_base = OTHER; note = 2'-O-methylguanosine-3'-phosphate
  modified_base 9: mod_base = OTHER; note = 2'-deoxy-2'-fluoroguanosine-3'-phosphate
  modified_base 10: mod_base = OTHER; note = 2'-deoxy-2'-fluoroguanosine-3'-phosphate
  modified_base 11: mod_base = OTHER; note = 2'-deoxy-2'-fluorouridine-3'-phosphate
  modified_base 12: mod_base = OTHER; note = 2'-O-methylcytidine-3'-phosphate
  modified_base 13: mod_base = OTHER; note = 2'-deoxy-2'-fluoroguanosine-3'-phosphate
  modified_base 14: mod_base = OTHER; note = 2'-O-methyladenosine-3'-phosphate
  modified_base 15: mod_base = OTHER; note = 2'-deoxy-2'-fluorocytidine-3'-phosphate
  modified_base 16: mod_base = OTHER; note = 2'-O-methyladenosine-3'-phosphate
  modified_base 17: mod_base = OTHER; note = 2'-deoxy-2'-fluorocytidine-3'-phosphate
  modified_base 18: mod_base = OTHER; note = 2'-O-methyladenosine-3'-phosphate
  modified_base 19: mod_base = OTHER; note = 2'-deoxy-2'-fluorouridine-3'-phosphate
  modified_base 20: mod_base = OTHER; note = 2'-O-methylcytidine-3'-phosphate
  modified_base 21: mod_base = OTHER; note = 2'-deoxy-2'-fluorouridine-3'-phosphate ((2S,4R)-1-[29-[[2-(acetylamino)-2-deoxy-beta-D-galactopyra nosyl]oxy]-14,14-bis[[3-[[3-[[5-[[2-(acetylamino)-2-deoxy-b eta-D-galactopyranosyl]oxy]-1-oxopentyl]amino]propyl]amino] -3-oxopropoxy]methyl]-1,12,19,25-tetraoxo-16-oxa-13,20,24-t riazanonacos-1-yl]-4-hydroxy-2-pyrrolidinyl)methyl ester
aggttcggggtcgacacatct

SEQ ID NO: 379 - RNA, 21 nt, synthetic construct
  source 1..21: mol_type = other RNA
  modified_base 1: mod_base = OTHER; note = 2'-deoxy-2'-fluorocytidine-3'-phosphorothioate
  modified_base 2: mod_base = OTHER; note = 2'-O-methylguanosine-3'-phosphorothioate
  modified_base 3: mod_base = OTHER; note = 2'-deoxy-2'-fluoroguanosine-3'-phosphate
  modified_base 4: mod_base = OTHER; note = 2'-O-methylguanosine-3'-phosphate
  modified_base 5: mod_base = OTHER; note = 2'-deoxy-2'-fluoroguanosine-3'-phosphate
  modified_base 6: mod_base = OTHER; note = 2'-O-methyluridine-3'-phosphate
  modified_base 7: mod_base = OTHER; note = 2'-deoxy-2'-fluorocytidine-3'-phosphate
  modified_base 8: mod_base = OTHER; note = 2'-O-methylguanosine-3'-phosphate
  modified_base 9: mod_base = OTHER; note = 2'-deoxy-2'-fluoroadenosine-3'-phosphate
  modified_base 10: mod_base = OTHER; note = 2'-deoxy-2'-fluorocytidine-3'-phosphate
  modified_base 11: mod_base = OTHER; note = 2'-deoxy-2'-fluoroadenosine-3'-phosphate
  modified_base 12: mod_base = OTHER; note = 2'-O-methylcytidine-3'-phosphate
  modified_base 13: mod_base = OTHER; note = 2'-deoxy-2'-fluoroadenosine-3'-phosphate
  modified_base 14: mod_base = OTHER; note = 2'-O-methyluridine-3'-phosphate
  modified_base 15: mod_base = OTHER; note = 2'-deoxy-2'-fluorocytidine-3'-phosphate
  modified_base 16: mod_base = OTHER; note = 2'-O-methyluridine-3'-phosphate
  modified_base 17: mod_base = OTHER; note = 2'-deoxy-2'-fluoroguanosine-3'-phosphate
  modified_base 18: mod_base = OTHER; note = 2'-O-methyluridine-3'-phosphate
  modified_base 19: mod_base = OTHER; note = 2'-deoxy-2'-fluoroguanosine-3'-phosphate
  modified_base 20: mod_base = OTHER; note = 2'-O-methylguanosine-3'-phosphate
  modified_base 21: mod_base = OTHER; note = 2'-deoxy-2'-fluoroguanosine-3'-phosphate ((2S,4R)-1-[29-[[2-(acetylamino)-2-deoxy-beta-D-galactopyra nosyl]oxy]-14,14-bis[[3-[[3-[[5-[[2-(acetylamino)-2-deoxy-b eta-D-galactopyranosyl]oxy]-1-oxopentyl]amino]propyl]amino] -3-oxopropoxy]methyl]-1,12,19,25-tetraoxo-16-oxa-13,20,24-t riazanonacos-1-yl]-4-hydroxy-2-pyrrolidinyl)methyl ester
cggggtcgacacatctgtggg

SEQ ID NO: 380 - RNA, 21 nt, synthetic construct
  source 1..21: mol_type = other RNA
  modified_base 1: mod_base = OTHER; note = 2'-deoxy-2'-fluorocytidine-3'-phosphorothioate
  modified_base 2: mod_base = OTHER; note = 2'-O-methylcytidine-3'-phosphorothioate
  modified_base 3: mod_base = OTHER; note = 2'-deoxy-2'-fluoroguanosine-3'-phosphate
  modified_base 4: mod_base = OTHER; note = 2'-O-methyladenosine-3'-phosphate
  modified_base 5: mod_base = OTHER; note = 2'-deoxy-2'-fluorocytidine-3'-phosphate
  modified_base 6: mod_base = OTHER; note = 2'-O-methyluridine-3'-phosphate
  modified_base 7: mod_base = OTHER; note = 2'-deoxy-2'-fluoroguanosine-3'-phosphate
  modified_base 8: mod_base = OTHER; note = 2'-O-methylguanosine-3'-phosphate
  modified_base 9: mod_base = OTHER; note = 2'-deoxy-2'-fluorocytidine-3'-phosphate
  modified_base 10: mod_base = OTHER; note = 2'-deoxy-2'-fluorocytidine-3'-phosphate
  modified_base 11: mod_base = OTHER; note = 2'-deoxy-2'-fluoroadenosine-3'-phosphate
  modified_base 12: mod_base = OTHER; note = 2'-O-methyluridine-3'-phosphate
  modified_base 13: mod_base = OTHER; note = 2'-deoxy-2'-fluoroguanosine-3'-phosphate
  modified_base 14: mod_base = OTHER; note = 2'-O-methyluridine-3'-phosphate
  modified_base 15: mod_base = OTHER; note = 2'-deoxy-2'-fluoroadenosine-3'-phosphate
  modified_base 16: mod_base = OTHER; note = 2'-O-methyluridine-3'-phosphate
  modified_base 17: mod_base = OTHER; note = 2'-deoxy-2'-fluoroguanosine-3'-phosphate
  modified_base 18: mod_base = OTHER; note = 2'-O-methyladenosine-3'-phosphate
  modified_base 19: mod_base = OTHER; note = 2'-deoxy-2'-fluorocytidine-3'-phosphate
  modified_base 20: mod_base = OTHER; note = 2'-O-methylguanosine-3'-phosphate
  modified_base 21: mod_base = OTHER; note = 2'-deoxy-2'-fluorouridine-3'-phosphate ((2S,4R)-1-[29-[[2-(acetylamino)-2-deoxy-beta-D-galactopyra nosyl]oxy]-14,14-bis[[3-[[3-[[5-[[2-(acetylamino)-2-deoxy-b eta-D-galactopyranosyl]oxy]-1-oxopentyl]amino]propyl]amino] -3-oxopropoxy]methyl]-1,12,19,25-tetraoxo-16-oxa-13,20,24-t riazanonacos-1-yl]-4-hydroxy-2-pyrrolidinyl)methyl ester
ccgactggccatgtatgacgt

SEQ ID NO: 381 - RNA, 21 nt, synthetic construct
  source 1..21: mol_type = other RNA
  modified_base 1: mod_base = OTHER; note = 2'-deoxy-2'-fluorocytidine-3'-phosphorothioate
  modified_base 2: mod_base = OTHER; note = 2'-O-methylcytidine-3'-phosphorothioate
  modified_base 3: mod_base = OTHER; note = 2'-deoxy-2'-fluoroadenosine-3'-phosphate
  modified_base 4: mod_base = OTHER; note = 2'-O-methylguanosine-3'-phosphate
  modified_base 5: mod_base = OTHER; note = 2'-deoxy-2'-fluoroguanosine-3'-phosphate
  modified_base 6: mod_base = OTHER; note = 2'-O-methyluridine-3'-phosphate
  modified_base 7: mod_base = OTHER; note = 2'-deoxy-2'-fluorouridine-3'-phosphate
  modified_base 8: mod_base = OTHER; note = 2'-O-methylcytidine-3'-phosphate
  modified_base 9: mod_base = OTHER; note = 2'-deoxy-2'-fluoroguanosine-3'-phosphate
  modified_base 10: mod_base = OTHER; note = 2'-deoxy-2'-fluoroguanosine-3'-phosphate
  modified_base 11: mod_base = OTHER; note = 2'-deoxy-2'-fluoroguanosine-3'-phosphate
  modified_base 12: mod_base = OTHER; note = 2'-O-methylguanosine-3'-phosphate
  modified_base 13: mod_base = OTHER; note = 2'-deoxy-2'-fluorouridine-3'-phosphate
  modified_base 14: mod_base = OTHER; note = 2'-O-methylcytidine-3'-phosphate
  modified_base 15: mod_base = OTHER; note = 2'-deoxy-2'-fluoroguanosine-3'-phosphate
  modified_base 16: mod_base = OTHER; note = 2'-O-methyladenosine-3'-phosphate
  modified_base 17: mod_base = OTHER; note = 2'-deoxy-2'-fluorocytidine-3'-phosphate
  modified_base 18: mod_base = OTHER; note = 2'-O-methyladenosine-3'-phosphate
  modified_base 19: mod_base = OTHER; note = 2'-deoxy-2'-fluorocytidine-3'-phosphate
  modified_base 20: mod_base = OTHER; note = 2'-O-methyladenosine-3'-phosphate
  modified_base 21: mod_base = OTHER; note = 2'-deoxy-2'-fluorouridine-3'-phosphate ((2S,4R)-1-[29-[[2-(acetylamino)-2-deoxy-beta-D-galactopyra nosyl]oxy]-14,14-bis[[3-[[3-[[5-[[2-(acetylamino)-2-deoxy-b eta-D-galactopyranosyl]oxy]-1-oxopentyl]amino]propyl]amino] -3-oxopropoxy]methyl]-1,12,19,25-tetraoxo-16-oxa-13,20,24-t riazanonacos-1-yl]-4-hydroxy-2-pyrrolidinyl)methyl ester
ccaggttcggggtcgacacat

SEQ ID NO: 382 - RNA, 21 nt, synthetic construct
  source 1..21: mol_type = other RNA
  modified_base 1: mod_base = OTHER; note = 2'-deoxy-2'-fluoroguanosine-3'-phosphorothioate
  modified_base 2: mod_base = OTHER; note = 2'-O-methylguanosine-3'-phosphorothioate
  modified_base 3: mod_base = OTHER; note = 2'-deoxy-2'-fluoroguanosine-3'-phosphate
  modified_base 4: mod_base = OTHER; note = 2'-O-methyluridine-3'-phosphate
  modified_base 5: mod_base = OTHER; note = 2'-deoxy-2'-fluorouridine-3'-phosphate
  modified_base 6: mod_base = OTHER; note = 2'-O-methylguanosine-3'-phosphate
  modified_base 7: mod_base = OTHER; note = 2'-deoxy-2'-fluorouridine-3'-phosphate
  modified_base 8: mod_base = OTHER; note = 2'-O-methyluridine-3'-phosphate
  modified_base 9: mod_base = OTHER; note = 2'-deoxy-2'-fluoroadenosine-3'-phosphate
  modified_base 10: mod_base = OTHER; note = 2'-deoxy-2'-fluorocytidine-3'-phosphate
  modified_base 11: mod_base = OTHER; note = 2'-deoxy-2'-fluorocytidine-3'-phosphate
  modified_base 12: mod_base = OTHER; note = 2'-O-methylguanosine-3'-phosphate
  modified_base 13: mod_base = OTHER; note = 2'-deoxy-2'-fluorocytidine-3'-phosphate
  modified_base 14: mod_base = OTHER; note = 2'-O-methyluridine-3'-phosphate
  modified_base 15: mod_base = OTHER; note = 2'-deoxy-2'-fluoroadenosine-3'-phosphate
  modified_base 16: mod_base = OTHER; note = 2'-O-methylcytidine-3'-phosphate
  modified_base 17: mod_base = OTHER; note = 2'-deoxy-2'-fluoroadenosine-3'-phosphate
  modified_base 18: mod_base = OTHER; note = 2'-O-methylguanosine-3'-phosphate
  modified_base 19: mod_base = OTHER; note = 2'-deoxy-2'-fluorocytidine-3'-phosphate
  modified_base 20: mod_base = OTHER; note = 2'-O-methyluridine-3'-phosphate
  modified_base 21: mod_base = OTHER; note = 2'-deoxy-2'-fluoroadenosine-3'-phosphate ((2S,4R)-1-[29-[[2-(acetylamino)-2-deoxy-beta-D-galactopyra nosyl]oxy]-14,14-bis[[3-[[3-[[5-[[2-(acetylamino)-2-deoxy-b eta-D-galactopyranosyl]oxy]-1-oxopentyl]amino]propyl]amino] -3-oxopropoxy]methyl]-1,12,19,25-tetraoxo-16-oxa-13,20,24-t riazanonacos-1-yl]-4-hydroxy-2-pyrrolidinyl)methyl ester
gggttgttaccgctacagcta

SEQ ID NO: 383 - RNA, 21 nt, synthetic construct
  source 1..21: mol_type = other RNA
  modified_base 1: mod_base = OTHER; note = 2'-deoxy-2'-fluorocytidine-3'-phosphorothioate
  modified_base 2: mod_base = OTHER; note = 2'-O-methylcytidine-3'-phosphorothioate
  modified_base 3: mod_base = OTHER; note = 2'-deoxy-2'-fluorouridine-3'-phosphate
  modified_base 4: mod_base = OTHER; note = 2'-O-methylguanosine-3'-phosphate
  modified_base 5: mod_base = OTHER; note = 2'-deoxy-2'-fluoroguanosine-3'-phosphate
  modified_base 6: mod_base = OTHER; note = 2'-O-methyluridine-3'-phosphate
  modified_base 7: mod_base = OTHER; note = 2'-deoxy-2'-fluorocytidine-3'-phosphate
  modified_base 8: mod_base = OTHER; note = 2'-O-methyluridine-3'-phosphate
  modified_base 9: mod_base = OTHER; note = 2'-deoxy-2'-fluoroadenosine-3'-phosphate
  modified_base 10: mod_base = OTHER; note = 2'-deoxy-2'-fluoroadenosine-3'-phosphate
  modified_base 11: mod_base = OTHER; note = 2'-deoxy-2'-fluorocytidine-3'-phosphate
  modified_base 12: mod_base = OTHER; note = 2'-O-methyluridine-3'-phosphate
  modified_base 13: mod_base = OTHER; note = 2'-deoxy-2'-fluorouridine-3'-phosphate
  modified_base 14: mod_base = OTHER; note = 2'-O-methylguanosine-3'-phosphate
  modified_base 15: mod_base = OTHER; note = 2'-deoxy-2'-fluoroguanosine-3'-phosphate
  modified_base 16: mod_base = OTHER; note = 2'-O-methylguanosine-3'-phosphate
  modified_base 17: mod_base = OTHER; note = 2'-deoxy-2'-fluoroadenosine-3'-phosphate
  modified_base 18: mod_base = OTHER; note = 2'-O-methyluridine-3'-phosphate
  modified_base 19: mod_base = OTHER; note = 2'-deoxy-2'-fluorocytidine-3'-phosphate
  modified_base 20: mod_base = OTHER; note = 2'-O-methyluridine-3'-phosphate
  modified_base 21: mod_base = OTHER; note = 2'-deoxy-2'-fluoroguanosine-3'-phosphate ((2S,4R)-1-[29-[[2-(acetylamino)-2-deoxy-beta-D-galactopyra nosyl]oxy]-14,14-bis[[3-[[3-[[5-[[2-(acetylamino)-2-deoxy-b eta-D-galactopyranosyl]oxy]-1-oxopentyl]amino]propyl]amino] -3-oxopropoxy]methyl]-1,12,19,25-tetraoxo-16-oxa-13,20,24-t riazanonacos-1-yl]-4-hydroxy-2-pyrrolidinyl)methyl ester
cctggtctaacttgggatctg

SEQ ID NO: 384 - RNA, 21 nt, synthetic construct
  source 1..21: mol_type = other RNA
  modified_base 1: mod_base = OTHER; note = 2'-deoxy-2'-fluorocytidine-3'-phosphorothioate
  modified_base 2: mod_base = OTHER; note = 2'-O-methyladenosine-3'-phosphorothioate
  modified_base 3: mod_base = OTHER; note = 2'-deoxy-2'-fluorocytidine-3'-phosphate
  modified_base 4: mod_base = OTHER; note = 2'-O-methylguanosine-3'-phosphate
  modified_base 5: mod_base = OTHER; note = 2'-deoxy-2'-fluorocytidine-3'-phosphate
  modified_base 6: mod_base = OTHER; note = 2'-O-methyluridine-3'-phosphate
  modified_base 7: mod_base = OTHER; note = 2'-deoxy-2'-fluoroguanosine-3'-phosphate
  modified_base 8: mod_base = OTHER; note = 2'-O-methylguanosine-3'-phosphate
  modified_base 9: mod_base = OTHER; note = 2'-deoxy-2'-fluoroguanosine-3'-phosphate
  modified_base 10: mod_base = OTHER; note = 2'-deoxy-2'-fluorouridine-3'-phosphate
  modified_base 11: mod_base = OTHER; note = 2'-deoxy-2'-fluorouridine-3'-phosphate
  modified_base 12: mod_base = OTHER; note = 2'-O-methylguanosine-3'-phosphate
  modified_base 13: mod_base = OTHER; note = 2'-deoxy-2'-fluorouridine-3'-phosphate
  modified_base 14: mod_base = OTHER; note = 2'-O-methyluridine-3'-phosphate
  modified_base 15: mod_base = OTHER; note = 2'-deoxy-2'-fluoroadenosine-3'-phosphate
  modified_base 16: mod_base = OTHER; note = 2'-O-methylcytidine-3'-phosphate
  modified_base 17: mod_base = OTHER; note = 2'-deoxy-2'-fluorocytidine-3'-phosphate
  modified_base 18: mod_base = OTHER; note = 2'-O-methylguanosine-3'-phosphate
  modified_base 19: mod_base = OTHER; note = 2'-deoxy-2'-fluorocytidine-3'-phosphate
  modified_base 20: mod_base = OTHER; note = 2'-O-methyluridine-3'-phosphate
  modified_base 21: mod_base = OTHER; note = 2'-deoxy-2'-fluoroadenosine-3'-phosphate ((2S,4R)-1-[29-[[2-(acetylamino)-2-deoxy-beta-D-galactopyra nosyl]oxy]-14,14-bis[[3-[[3-[[5-[[2-(acetylamino)-2-deoxy-b eta-D-galactopyranosyl]oxy]-1-oxopentyl]amino]propyl]amino] -3-oxopropoxy]methyl]-1,12,19,25-tetraoxo-16-oxa-13,20,24-t riazanonacos-1-yl]-4-hydroxy-2-pyrrolidinyl)methyl ester
cacgctgggttgttaccgcta

SEQ ID NO: 385 - RNA, 21 nt, synthetic construct
  source 1..21: mol_type = other RNA
  modified_base 1: mod_base = OTHER; note = 2'-deoxy-2'-fluoroguanosine-3'-phosphorothioate
  modified_base 2: mod_base = OTHER; note = 2'-O-methylguanosine-3'-phosphorothioate
  modified_base 3: mod_base = OTHER; note = 2'-deoxy-2'-fluoroguanosine-3'-phosphate
  modified_base 4: mod_base = OTHER; note = 2'-O-methylguanosine-3'-phosphate
  modified_base 5: mod_base = OTHER; note = 2'-deoxy-2'-fluorouridine-3'-phosphate
  modified_base 6: mod_base = OTHER; note = 2'-O-methylcytidine-3'-phosphate
  modified_base 7: mod_base = OTHER; note = 2'-deoxy-2'-fluoroguanosine-3'-phosphate
  modified_base 8: mod_base = OTHER; note = 2'-O-methyladenosine-3'-phosphate
  modified_base 9: mod_base = OTHER; note = 2'-deoxy-2'-fluorocytidine-3'-phosphate
  modified_base 10: mod_base = OTHER; note = 2'-deoxy-2'-fluoroadenosine-3'-phosphate
  modified_base 11: mod_base = OTHER; note = 2'-deoxy-2'-fluorocytidine-3'-phosphate
  modified_base 12: mod_base = OTHER; note = 2'-O-methyladenosine-3'-phosphate
  modified_base 13: mod_base = OTHER; note = 2'-deoxy-2'-fluorouridine-3'-phosphate
  modified_base 14: mod_base = OTHER; note = 2'-O-methylcytidine-3'-phosphate
  modified_base 15: mod_base = OTHER; note = 2'-deoxy-2'-fluorouridine-3'-phosphate
  modified_base 16: mod_base = OTHER; note = 2'-O-methylguanosine-3'-phosphate
  modified_base 17: mod_base = OTHER; note = 2'-deoxy-2'-fluorouridine-3'-phosphate
  modified_base 18: mod_base = OTHER; note = 2'-O-methylguanosine-3'-phosphate
  modified_base 19: mod_base = OTHER; note = 2'-deoxy-2'-fluoroguanosine-3'-phosphate
  modified_base 20: mod_base = OTHER; note = 2'-O-methylguanosine-3'-phosphate
  modified_base 21: mod_base = OTHER; note = 2'-deoxy-2'-fluoroguanosine-3'-phosphate ((2S,4R)-1-[29-[[2-(acetylamino)-2-deoxy-beta-D-galactopyra nosyl]oxy]-14,14-bis[[3-[[3-[[5-[[2-(acetylamino)-2-deoxy-b eta-D-galactopyranosyl]oxy]-1-oxopentyl]amino]propyl]amino] -3-oxopropoxy]methyl]-1,12,19,25-tetraoxo-16-oxa-13,20,24-t riazanonacos-1-yl]-4-hydroxy-2-pyrrolidinyl)methyl ester
ggggtcgacacatctgtgggg

SEQ ID NO: 386 - RNA, 21 nt, synthetic construct
  source 1..21: mol_type = other RNA
  modified_base 1: mod_base = OTHER; note = 2'-deoxy-2'-fluorouridine-3'-phosphorothioate
  modified_base 2: mod_base = OTHER; note = 2'-O-methylguanosine-3'-phosphorothioate
  modified_base 3: mod_base = OTHER; note = 2'-deoxy-2'-fluorouridine-3'-phosphate
  modified_base 4: mod_base = OTHER; note = 2'-O-methylguanosine-3'-phosphate
  modified_base 5: mod_base = OTHER; note = 2'-deoxy-2'-fluorocytidine-3'-phosphate
  modified_base 6: mod_base = OTHER; note = 2'-O-methylguanosine-3'-phosphate
  modified_base 7: mod_base = OTHER; note = 2'-deoxy-2'-fluoroguanosine-3'-phosphate
  modified_base 8: mod_base = OTHER; note = 2'-O-methylguanosine-3'-phosphate
  modified_base 9: mod_base = OTHER; note = 2'-deoxy-2'-fluorouridine-3'-phosphate
  modified_base 10: mod_base = OTHER; note = 2'-deoxy-2'-fluoroguanosine-3'-phosphate
  modified_base 11: mod_base = OTHER; note = 2'-deoxy-2'-fluorocytidine-3'-phosphate
  modified_base 12: mod_base = OTHER; note = 2'-O-methyladenosine-3'-phosphate
  modified_base 13: mod_base = OTHER; note = 2'-deoxy-2'-fluorocytidine-3'-phosphate
  modified_base 14: mod_base = OTHER; note = 2'-O-methyluridine-3'-phosphate
  modified_base 15: mod_base = OTHER; note = 2'-deoxy-2'-fluoroadenosine-3'-phosphate
  modified_base 16: mod_base = OTHER; note = 2'-O-methyluridine-3'-phosphate
  modified_base 17: mod_base = OTHER; note = 2'-deoxy-2'-fluoroguanosine-3'-phosphate
  modified_base 18: mod_base = OTHER; note = 2'-O-methylguanosine-3'-phosphate
  modified_base 19: mod_base = OTHER; note = 2'-deoxy-2'-fluorocytidine-3'-phosphate
  modified_base 20: mod_base = OTHER; note = 2'-O-methyluridine-3'-phosphate
  modified_base 21: mod_base = OTHER; note = 2'-deoxy-2'-fluorouridine-3'-phosphate ((2S,4R)-1-[29-[[2-(acetylamino)-2-deoxy-beta-D-galactopyra nosyl]oxy]-14,14-bis[[3-[[3-[[5-[[2-(acetylamino)-2-deoxy-b eta-D-galactopyranosyl]oxy]-1-oxopentyl]amino]propyl]amino] -3-oxopropoxy]methyl]-1,12,19,25-tetraoxo-16-oxa-13,20,24-t riazanonacos-1-yl]-4-hydroxy-2-pyrrolidinyl)methyl ester
tgtgcgggtgcactatggctt

SEQ ID NO: 387 - RNA, 21 nt, synthetic construct
  source 1..21: mol_type = other RNA
  modified_base 1: mod_base = OTHER; note = 2'-deoxy-2'-fluorocytidine-3'-phosphorothioate
  modified_base 2: mod_base = OTHER; note = 2'-O-methylcytidine-3'-phosphorothioate
  modified_base 3: mod_base = OTHER; note = 2'-deoxy-2'-fluorocytidine-3'-phosphate
  modified_base 4: mod_base = OTHER; note = 2'-O-methylcytidine-3'-phosphate
  modified_base 5: mod_base = OTHER; note = 2'-deoxy-2'-fluorouridine-3'-phosphate
  modified_base 6: mod_base = OTHER; note = 2'-O-methylguanosine-3'-phosphate
  modified_base 7: mod_base = OTHER; note = 2'-deoxy-2'-fluoroguanosine-3'-phosphate
  modified_base 8: mod_base = OTHER; note = 2'-O-methyluridine-3'-phosphate
  modified_base 9: mod_base = OTHER; note = 2'-deoxy-2'-fluorocytidine-3'-phosphate
  modified_base 10: mod_base = OTHER; note = 2'-deoxy-2'-fluorouridine-3'-phosphate
  modified_base 11: mod_base = OTHER; note = 2'-deoxy-2'-fluoroadenosine-3'-phosphate
  modified_base 12: mod_base = OTHER; note = 2'-O-methyladenosine-3'-phosphate
  modified_base 13: mod_base = OTHER; note = 2'-deoxy-2'-fluorocytidine-3'-phosphate
  modified_base 14: mod_base = OTHER; note = 2'-O-methyluridine-3'-phosphate
  modified_base 15: mod_base = OTHER; note = 2'-deoxy-2'-fluorouridine-3'-phosphate
  modified_base 16: mod_base = OTHER; note = 2'-O-methylguanosine-3'-phosphate
  modified_base 17: mod_base = OTHER; note = 2'-deoxy-2'-fluoroguanosine-3'-phosphate
  modified_base 18: mod_base = OTHER; note = 2'-O-methylguanosine-3'-phosphate
  modified_base 19: mod_base = OTHER; note = 2'-deoxy-2'-fluoroadenosine-3'-phosphate
  modified_base 20: mod_base = OTHER; note = 2'-O-methyluridine-3'-phosphate
  modified_base 21: mod_base = OTHER; note = 2'-deoxy-2'-fluorocytidine-3'-phosphate ((2S,4R)-1-[29-[[2-(acetylamino)-2-deoxy-beta-D-galactopyra nosyl]oxy]-14,14-bis[[3-[[3-[[5-[[2-(acetylamino)-2-deoxy-b eta-D-galactopyranosyl]oxy]-1-oxopentyl]amino]propyl]amino] -3-oxopropoxy]methyl]-1,12,19,25-tetraoxo-16-oxa-13,20,24-t riazanonacos-1-yl]-4-hydroxy-2-pyrrolidinyl)methyl ester
cccctggtctaacttgggatc

SEQ ID NO: 388 - RNA, 21 nt, synthetic construct
  source 1..21: mol_type = other RNA
  modified_base 1: mod_base = OTHER; note = 2'-deoxy-2'-fluoroguanosine-3'-phosphorothioate
  modified_base 2: mod_base = OTHER; note = 2'-O-methylguanosine-3'-phosphorothioate
  modified_base 3: mod_base = OTHER; note = 2'-deoxy-2'-fluorocytidine-3'-phosphate
  modified_base 4: mod_base = OTHER; note = 2'-O-methylcytidine-3'-phosphate
  modified_base 5: mod_base = OTHER; note = 2'-deoxy-2'-fluorouridine-3'-phosphate
  modified_base 6: mod_base = OTHER; note = 2'-O-methylguanosine-3'-phosphate
  modified_base 7: mod_base = OTHER; note = 2'-deoxy-2'-fluoroguanosine-3'-phosphate
  modified_base 8: mod_base = OTHER; note = 2'-O-methyladenosine-3'-phosphate
  modified_base 9: mod_base = OTHER; note = 2'-deoxy-2'-fluoroguanosine-3'-phosphate
  modified_base 10: mod_base = OTHER; note = 2'-deoxy-2'-fluoroadenosine-3'-phosphate
  modified_base 11: mod_base = OTHER; note = 2'-deoxy-2'-fluoroguanosine-3'-phosphate
  modified_base 12: mod_base = OTHER; note = 2'-O-methylguanosine-3'-phosphate
  modified_base 13: mod_base = OTHER; note = 2'-deoxy-2'-fluorouridine-3'-phosphate
  modified_base 14: mod_base = OTHER; note = 2'-O-methylguanosine-3'-phosphate
  modified_base 15: mod_base = OTHER; note = 2'-deoxy-2'-fluorouridine-3'-phosphate
  modified_base 16: mod_base = OTHER; note = 2'-O-methylcytidine-3'-phosphate
  modified_base 17: mod_base = OTHER; note = 2'-deoxy-2'-fluorocytidine-3'-phosphate
  modified_base 18: mod_base = OTHER; note = 2'-O-methyluridine-3'-phosphate
  modified_base 19: mod_base = OTHER; note = 2'-deoxy-2'-fluorouridine-3'-phosphate
  modified_base 20: mod_base = OTHER; note = 2'-O-methylcytidine-3'-phosphate
  modified_base 21: mod_base = OTHER; note = 2'-deoxy-2'-fluoroadenosine-3'-phosphate ((2S,4R)-1-[29-[[2-(acetylamino)-2-deoxy-beta-D-galactopyra nosyl]oxy]-14,14-bis[[3-[[3-[[5-[[2-(acetylamino)-2-deoxy-b eta-D-galactopyranosyl]oxy]-1-oxopentyl]amino]propyl]amino] -3-oxopropoxy]methyl]-1,12,19,25-tetraoxo-16-oxa-13,20,24-t riazanonacos-1-yl]-4-hydroxy-2-pyrrolidinyl)methyl ester
ggcctggagaggtgtccttca

SEQ ID NO: 389 - RNA, 21 nt, synthetic construct
  source 1..21: mol_type = other RNA
  modified_base 1: mod_base = OTHER; note = 2'-deoxy-2'-fluorocytidine-3'-phosphorothioate
  modified_base 2: mod_base = OTHER; note = 2'-O-methyluridine-3'-phosphorothioate
  modified_base 3: mod_base = OTHER; note = 2'-deoxy-2'-fluorouridine-3'-phosphate
  modified_base 4: mod_base = OTHER; note = 2'-O-methylcytidine-3'-phosphate
  modified_base 5: mod_base = OTHER; note = 2'-deoxy-2'-fluorouridine-3'-phosphate
  modified_base 6: mod_base = OTHER; note = 2'-O-methyluridine-3'-phosphate
  modified_base 7: mod_base = OTHER; note = 2'-deoxy-2'-fluorocytidine-3'-phosphate
  modified_base 8: mod_base = OTHER; note = 2'-O-methyluridine-3'-phosphate
  modified_base 9: mod_base = OTHER; note = 2'-deoxy-2'-fluoroguanosine-3'-phosphate
  modified_base 10: mod_base = OTHER; note = 2'-deoxy-2'-fluoroguanosine-3'-phosphate
  modified_base 11: mod_base = OTHER; note = 2'-deoxy-2'-fluorouridine-3'-phosphate
  modified_base 12: mod_base = OTHER; note = 2'-O-methyluridine-3'-phosphate
  modified_base 13: mod_base = OTHER; note = 2'-deoxy-2'-fluorocytidine-3'-phosphate
  modified_base 14: mod_base = OTHER; note = 2'-O-methyladenosine-3'-phosphate
  modified_base 15: mod_base = OTHER; note = 2'-deoxy-2'-fluorouridine-3'-phosphate
  modified_base 16: mod_base = OTHER; note = 2'-O-methyluridine-3'-phosphate
  modified_base 17: mod_base = OTHER; note = 2'-deoxy-2'-fluorocytidine-3'-phosphate
  modified_base 18: mod_base = OTHER; note = 2'-O-methyluridine-3'-phosphate
  modified_base 19: mod_base = OTHER; note = 2'-deoxy-2'-fluorocytidine-3'-phosphate
  modified_base 20: mod_base = OTHER; note = 2'-O-methylcytidine-3'-phosphate
  modified_base 21: mod_base = OTHER; note = 2'-deoxy-2'-fluoroadenosine-3'-phosphate ((2S,4R)-1-[29-[[2-(acetylamino)-2-deoxy-beta-D-galactopyra nosyl]oxy]-14,14-bis[[3-[[3-[[5-[[2-(acetylamino)-2-deoxy-b eta-D-galactopyranosyl]oxy]-1-oxopentyl]amino]propyl]amino] -3-oxopropoxy]methyl]-1,12,19,25-tetraoxo-16-oxa-13,20,24-t riazanonacos-1-yl]-4-hydroxy-2-pyrrolidinyl)methyl ester
cttcttctggttcattctcca

SEQ ID NO: 390 - RNA, 21 nt, synthetic construct
  source 1..21: mol_type = other RNA
  modified_base 1: mod_base = OTHER; note = 2'-deoxy-2'-fluorocytidine-3'-phosphorothioate
  modified_base 2: mod_base = OTHER; note = 2'-O-methylcytidine-3'-phosphorothioate
  modified_base 3: mod_base = OTHER; note = 2'-deoxy-2'-fluoroadenosine-3'-phosphate
  modified_base 4: mod_base = OTHER; note = 2'-O-methyladenosine-3'-phosphate
  modified_base 5: mod_base = OTHER; note = 2'-deoxy-2'-fluoroguanosine-3'-phosphate
  modified_base 6: mod_base = OTHER; note = 2'-O-methylcytidine-3'-phosphate
  modified_base 7: mod_base = OTHER; note = 2'-deoxy-2'-fluoroadenosine-3'-phosphate
  modified_base 8: mod_base = OTHER; note = 2'-O-methylguanosine-3'-phosphate
  modified_base 9: mod_base = OTHER; note = 2'-deoxy-2'-fluoroguanosine-3'-phosphate
  modified_base 10: mod_base = OTHER; note = 2'-deoxy-2'-fluoroguanosine-3'-phosphate
  modified_base 11: mod_base = OTHER; note = 2'-deoxy-2'-fluoroguanosine-3'-phosphate
  modified_base 12: mod_base = OTHER; note = 2'-O-methylguanosine-3'-phosphate
  modified_base 13: mod_base = OTHER; note = 2'-deoxy-2'-fluoroadenosine-3'-phosphate
  modified_base 14: mod_base = OTHER; note = 2'-O-methylcytidine-3'-phosphate
  modified_base 15: mod_base = OTHER; note = 2'-deoxy-2'-fluoroadenosine-3'-phosphate
  modified_base 16: mod_base = OTHER; note = 2'-O-methyladenosine-3'-phosphate
  modified_base 17: mod_base = OTHER; note = 2'-deoxy-2'-fluoroguanosine-3'-phosphate
  modified_base 18: mod_base = OTHER; note = 2'-O-methyluridine-3'-phosphate
  modified_base 19: mod_base = OTHER; note = 2'-deoxy-2'-fluoroadenosine-3'-phosphate
  modified_base 20: mod_base = OTHER; note = 2'-O-methyluridine-3'-phosphate
  modified_base 21: mod_base = OTHER; note = 2'-deoxy-2'-fluorouridine-3'-phosphate ((2S,4R)-1-[29-[[2-(acetylamino)-2-deoxy-beta-D-galactopyra nosyl]oxy]-14,14-bis[[3-[[3-[[5-[[2-(acetylamino)-2-deoxy-b eta-D-galactopyranosyl]oxy]-1-oxopentyl]amino]propyl]amino] -3-oxopropoxy]methyl]-1,12,19,25-tetraoxo-16-oxa-13,20,24-t riazanonacos-1-yl]-4-hydroxy-2-pyrrolidinyl)methyl ester
ccaagcagggggacaagtatt

SEQ ID NO: 391 - RNA, 21 nt, synthetic construct
  source 1..21: mol_type = other RNA
  modified_base 1: mod_base = OTHER; note = 2'-deoxy-2'-fluorocytidine-3'-phosphorothioate
  modified_base 2: mod_base = OTHER; note = 2'-O-methyluridine-3'-phosphorothioate
  modified_base 3: mod_base = OTHER; note = 2'-deoxy-2'-fluorouridine-3'-phosphate
  modified_base 4: mod_base = OTHER; note = 2'-O-methylcytidine-3'-phosphate
  modified_base 5: mod_base = OTHER; note = 2'-deoxy-2'-fluorocytidine-3'-phosphate
  modified_base 6: mod_base = OTHER; note = 2'-O-methyladenosine-3'-phosphate
  modified_base 7: mod_base = OTHER; note = 2'-deoxy-2'-fluoroguanosine-3'-phosphate
  modified_base 8: mod_base = OTHER; note = 2'-O-methylguanosine-3'-phosphate
  modified_base 9: mod_base = OTHER; note = 2'-deoxy-2'-fluoroadenosine-3'-phosphate
  modified_base 10: mod_base = OTHER; note = 2'-deoxy-2'-fluoroguanosine-3'-phosphate
  modified_base 11: mod_base = OTHER; note = 2'-deoxy-2'-fluoroguanosine-3'-phosphate
  modified_base 12: mod_base = OTHER; note = 2'-O-methyladenosine-3'-phosphate
  modified_base 13: mod_base = OTHER; note = 2'-deoxy-2'-fluorocytidine-3'-phosphate
  modified_base 14: mod_base = OTHER; note = 2'-O-methyladenosine-3'-phosphate
  modified_base 15: mod_base = OTHER; note = 2'-deoxy-2'-fluoroguanosine-3'-phosphate
  modified_base 16: mod_base = OTHER; note = 2'-O-methylcytidine-3'-phosphate
  modified_base 17: mod_base = OTHER; note = 2'-deoxy-2'-fluoroadenosine-3'-phosphate
  modified_base 18: mod_base = OTHER; note = 2'-O-methyluridine-3'-phosphate
  modified_base 19: mod_base = OTHER; note = 2'-deoxy-2'-fluoroguanosine-3'-phosphate
  modified_base 20: mod_base = OTHER; note = 2'-O-methylguanosine-3'-phosphate
  modified_base 21: mod_base = OTHER; note = 2'-deoxy-2'-fluorocytidine-3'-phosphate ((2S,4R)-1-[29-[[2-(acetylamino)-2-deoxy-beta-D-galactopyra nosyl]oxy]-14,14-bis[[3-[[3-[[5-[[2-(acetylamino)-2-deoxy-b eta-D-galactopyranosyl]oxy]-1-oxopentyl]amino]propyl]amino] -3-oxopropoxy]methyl]-1,12,19,25-tetraoxo-16-oxa-13,20,24-t riazanonacos-1-yl]-4-hydroxy-2-pyrrolidinyl)methyl ester
cttccaggaggacagcatggc

SEQ ID NO: 392 - RNA, 21 nt, synthetic construct
  source 1..21: mol_type = other RNA
  modified_base 1: mod_base = OTHER; note = 2'-deoxy-2'-fluorocytidine-3'-phosphorothioate
  modified_base 2: mod_base = OTHER; note = 2'-O-methylcytidine-3'-phosphorothioate
  modified_base 3: mod_base = OTHER; note = 2'-deoxy-2'-fluorouridine-3'-phosphate
  modified_base 4: mod_base = OTHER; note = 2'-O-methylguanosine-3'-phosphate
  modified_base 5: mod_base = OTHER; note = 2'-deoxy-2'-fluoroguanosine-3'-phosphate
  modified_base 6: mod_base = OTHER; note = 2'-O-methyladenosine-3'-phosphate
  modified_base 7: mod_base = OTHER; note = 2'-deoxy-2'-fluorouridine-3'-phosphate
  modified_base 8: mod_base = OTHER; note = 2'-O-methylguanosine-3'-phosphate
  modified_base 9: mod_base = OTHER; note = 2'-deoxy-2'-fluoroadenosine-3'-phosphate
  modified_base 10: mod_base = OTHER; note = 2'-deoxy-2'-fluoroguanosine-3'-phosphate
  modified_base 11: mod_base = OTHER; note = 2'-deoxy-2'-fluoroadenosine-3'-phosphate
  modified_base 12: mod_base = OTHER; note = 2'-O-methylguanosine-3'-phosphate
  modified_base 13: mod_base = OTHER; note = 2'-deoxy-2'-fluoroadenosine-3'-phosphate
  modified_base 14: mod_base = OTHER; note = 2'-O-methyladenosine-3'-phosphate
  modified_base 15: mod_base = OTHER; note = 2'-deoxy-2'-fluoroadenosine-3'-phosphate
  modified_base 16: mod_base = OTHER; note = 2'-O-methylcytidine-3'-phosphate
  modified_base 17: mod_base = OTHER; note = 2'-deoxy-2'-fluorouridine-3'-phosphate
  modified_base 18: mod_base = OTHER; note = 2'-O-methylguanosine-3'-phosphate
  modified_base 19: mod_base = OTHER; note = 2'-deoxy-2'-fluorocytidine-3'-phosphate
  modified_base 20: mod_base = OTHER; note = 2'-O-methylguanosine-3'-phosphate
  modified_base 21: mod_base = OTHER; note = 2'-deoxy-2'-fluorouridine-3'-phosphate ((2S,4R)-1-[29-[[2-(acetylamino)-2-deoxy-beta-D-galactopyra nosyl]oxy]-14,14-bis[[3-[[3-[[5-[[2-(acetylamino)-2-deoxy-b eta-D-galactopyranosyl]oxy]-1-oxopentyl]amino]propyl]amino] -3-oxopropoxy]methyl]-1,12,19,25-tetraoxo-16-oxa-13,20,24-t riazanonacos-1-yl]-4-hydroxy-2-pyrrolidinyl)methyl ester
cctggatgagagaaactgcgt

SEQ ID NO: 393 - RNA, 21 nt, synthetic construct
  source 1..21: mol_type = other RNA
  modified_base 1: mod_base = OTHER; note = 2'-deoxy-2'-fluoroguanosine-3'-phosphorothioate
  modified_base 2: mod_base = OTHER; note = 2'-O-methylcytidine-3'-phosphorothioate
  modified_base 3: mod_base = OTHER; note = 2'-deoxy-2'-fluorocytidine-3'-phosphate
  modified_base 4: mod_base = OTHER; note = 2'-O-methyladenosine-3'-phosphate
  modified_base 5: mod_base = OTHER; note = 2'-deoxy-2'-fluorocytidine-3'-phosphate
  modified_base 6: mod_base = OTHER; note = 2'-O-methyluridine-3'-phosphate
  modified_base 7: mod_base = OTHER; note = 2'-deoxy-2'-fluorouridine-3'-phosphate
  modified_base 8: mod_base = OTHER; note = 2'-O-methylcytidine-3'-phosphate
  modified_base 9: mod_base = OTHER; note = 2'-deoxy-2'-fluorouridine-3'-phosphate
  modified_base 10: mod_base = OTHER; note = 2'-deoxy-2'-fluorocytidine-3'-phosphate
  modified_base 11: mod_base = OTHER; note = 2'-deoxy-2'-fluorocytidine-3'-phosphate
  modified_base 12: mod_base = OTHER; note = 2'-O-methylcytidine-3'-phosphate
  modified_base 13: mod_base = OTHER; note = 2'-deoxy-2'-fluoroadenosine-3'-phosphate
  modified_base 14: mod_base = OTHER; note = 2'-O-methylguanosine-3'-phosphate
  modified_base 15: mod_base = OTHER; note = 2'-deoxy-2'-fluoroguanosine-3'-phosphate
  modified_base 16: mod_base = OTHER; note = 2'-O-methyladenosine-3'-phosphate
  modified_base 17: mod_base = OTHER; note = 2'-deoxy-2'-fluorouridine-3'-phosphate
  modified_base 18: mod_base = OTHER; note = 2'-O-methylcytidine-3'-phosphate
  modified_base 19: mod_base = OTHER; note = 2'-deoxy-2'-fluorouridine-3'-phosphate
  modified_base 20: mod_base = OTHER; note = 2'-O-methyluridine-3'-phosphate
  modified_base 21: mod_base = OTHER; note = 2'-deoxy-2'-fluoroadenosine-3'-phosphate ((2S,4R)-1-[29-[[2-(acetylamino)-2-deoxy-beta-D-galactopyra nosyl]oxy]-14,14-bis[[3-[[3-[[5-[[2-(acetylamino)-2-deoxy-b eta-D-galactopyranosyl]oxy]-1-oxopentyl]amino]propyl]amino] -3-oxopropoxy]methyl]-1,12,19,25-tetraoxo-16-oxa-13,20,24-t riazanonacos-1-yl]-4-hydroxy-2-pyrrolidinyl)methyl ester
gccacttctcccaggatctta

SEQ ID NO: 394 - RNA, 21 nt, synthetic construct
  source 1..21: mol_type = other RNA
  modified_base 1: mod_base = OTHER; note = 2'-deoxy-2'-fluoroguanosine-3'-phosphorothioate
  modified_base 2: mod_base = OTHER; note = 2'-O-methylcytidine-3'-phosphorothioate
  modified_base 3: mod_base = OTHER; note = 2'-deoxy-2'-fluoroguanosine-3'-phosphate
  modified_base 4: mod_base = OTHER; note = 2'-O-methylguanosine-3'-phosphate
  modified_base 5: mod_base = OTHER; note = 2'-deoxy-2'-fluoroguanosine-3'-phosphate
  modified_base 6: mod_base = OTHER; note = 2'-O-methyluridine-3'-phosphate
  modified_base 7: mod_base = OTHER; note = 2'-deoxy-2'-fluoroguanosine-3'-phosphate
  modified_base 8: mod_base = OTHER; note = 2'-O-methylcytidine-3'-phosphate
  modified_base 9: mod_base = OTHER; note = 2'-deoxy-2'-fluoroadenosine-3'-phosphate
  modified_base 10: mod_base = OTHER; note = 2'-deoxy-2'-fluorocytidine-3'-phosphate
  modified_base 11: mod_base = OTHER; note = 2'-deoxy-2'-fluorouridine-3'-phosphate
  modified_base 12: mod_base = OTHER; note = 2'-O-methyladenosine-3'-phosphate
  modified_base 13: mod_base = OTHER; note = 2'-deoxy-2'-fluorouridine-3'-phosphate
  modified_base 14: mod_base = OTHER; note = 2'-O-methylguanosine-3'-phosphate
  modified_base 15: mod_base = OTHER; note = 2'-deoxy-2'-fluoroguanosine-3'-phosphate
  modified_base 16: mod_base = OTHER; note = 2'-O-methylcytidine-3'-phosphate
  modified_base 17: mod_base = OTHER; note = 2'-deoxy-2'-fluorouridine-3'-phosphate
  modified_base 18: mod_base = OTHER; note = 2'-O-methyluridine-3'-phosphate
  modified_base 19: mod_base = OTHER; note = 2'-deoxy-2'-fluoroguanosine-3'-phosphate
  modified_base 20: mod_base = OTHER; note = 2'-O-methyluridine-3'-phosphate
  modified_base 21: mod_base = OTHER; note = 2'-deoxy-2'-fluoroadenosine-3'-phosphate ((2S,4R)-1-[29-[[2-(acetylamino)-2-deoxy-beta-D-galactopyra nosyl]oxy]-14,14-bis[[3-[[3-[[5-[[2-(acetylamino)-2-deoxy-b eta-D-galactopyranosyl]oxy]-1-oxopentyl]amino]propyl]amino] -3-oxopropoxy]methyl]-1,12,19,25-tetraoxo-16-oxa-13,20,24-t riazanonacos-1-yl]-4-hydroxy-2-pyrrolidinyl)methyl ester
gcgggtgcactatggcttgta

SEQ ID NO: 395 - RNA, 21 nt, synthetic construct
  source 1..21: mol_type = other RNA
  modified_base 1: mod_base = OTHER; note = 2'-deoxy-2'-fluorocytidine-3'-phosphorothioate
  modified_base 2: mod_base = OTHER; note = 2'-O-methyladenosine-3'-phosphorothioate
  modified_base 3: mod_base = OTHER; note = 2'-deoxy-2'-fluoroadenosine-3'-phosphate
  modified_base 4: mod_base = OTHER; note = 2'-O-methylcytidine-3'-phosphate
  modified_base 5: mod_base = OTHER; note = 2'-deoxy-2'-fluoroguanosine-3'-phosphate
  modified_base 6: mod_base = OTHER; note = 2'-O-methylguanosine-3'-phosphate
  modified_base 7: mod_base = OTHER; note = 2'-deoxy-2'-fluorocytidine-3'-phosphate
  modified_base 8: mod_base = OTHER; note = 2'-O-methylcytidine-3'-phosphate
  modified_base 9: mod_base = OTHER; note = 2'-deoxy-2'-fluorouridine-3'-phosphate
  modified_base 10: mod_base = OTHER; note = 2'-deoxy-2'-fluoroguanosine-3'-phosphate
  modified_base 11: mod_base = OTHER; note = 2'-deoxy-2'-fluoroguanosine-3'-phosphate
  modified_base 12: mod_base = OTHER; note = 2'-O-methyladenosine-3'-phosphate
  modified_base 13: mod_base = OTHER; note = 2'-deoxy-2'-fluorouridine-3'-phosphate
  modified_base 14: mod_base = OTHER; note = 2'-O-methylguanosine-3'-phosphate
  modified_base 15: mod_base = OTHER; note = 2'-deoxy-2'-fluoroadenosine-3'-phosphate
  modified_base 16: mod_base = OTHER; note = 2'-O-methylguanosine-3'-phosphate
  modified_base 17: mod_base = OTHER; note = 2'-deoxy-2'-fluoroadenosine-3'-phosphate
  modified_base 18: mod_base = OTHER; note = 2'-O-methylguanosine-3'-phosphate
  modified_base 19: mod_base = OTHER; note = 2'-deoxy-2'-fluoroadenosine-3'-phosphate
  modified_base 20: mod_base = OTHER; note = 2'-O-methyladenosine-3'-phosphate
  modified_base 21: mod_base = OTHER; note = 2'-deoxy-2'-fluoroadenosine-3'-phosphate ((2S,4R)-1-[29-[[2-(acetylamino)-2-deoxy-beta-D-galactopyra nosyl]oxy]-14,14-bis[[3-[[3-[[5-[[2-(acetylamino)-2-deoxy-b eta-D-galactopyranosyl]oxy]-1-oxopentyl]amino]propyl]amino] -3-oxopropoxy]methyl]-1,12,19,25-tetraoxo-16-oxa-13,20,24-t riazanonacos-1-yl]-4-hydroxy-2-pyrrolidinyl)methyl ester
caacggcctggatgagagaaa

SEQ ID NO: 396 - RNA, 21 nt, synthetic construct
  source 1..21: mol_type = other RNA
  modified_base 1: mod_base = OTHER; note = 2'-deoxy-2'-fluorocytidine-3'-phosphorothioate
  modified_base 2: mod_base = OTHER; note = 2'-O-methylcytidine-3'-phosphorothioate
  modified_base 3: mod_base = OTHER; note = 2'-deoxy-2'-fluoroadenosine-3'-phosphate
  modified_base 4: mod_base = OTHER; note = 2'-O-methylguanosine-3'-phosphate
  modified_base 5: mod_base = OTHER; note = 2'-deoxy-2'-fluoroadenosine-3'-phosphate
  modified_base 6: mod_base = OTHER; note = 2'-O-methyladenosine-3'-phosphate
  modified_base 7: mod_base = OTHER; note = 2'-deoxy-2'-fluorocytidine-3'-phosphate
  modified_base 8: mod_base = OTHER; note = 2'-O-methyladenosine-3'-phosphate
  modified_base 9: mod_base = OTHER; note = 2'-deoxy-2'-fluoroguanosine-3'-phosphate
  modified_base 10: mod_base = OTHER; note = 2'-deoxy-2'-fluoroguanosine-3'-phosphate
  modified_base 11: mod_base = OTHER; note = 2'-deoxy-2'-fluoroadenosine-3'-phosphate
  modified_base 12: mod_base = OTHER; note = 2'-O-methylguanosine-3'-phosphate
  modified_base 13: mod_base = OTHER; note = 2'-deoxy-2'-fluoroguanosine-3'-phosphate
  modified_base 14: mod_base = OTHER; note = 2'-O-methylcytidine-3'-phosphate
  modified_base 15: mod_base = OTHER; note = 2'-deoxy-2'-fluorouridine-3'-phosphate
  modified_base 16: mod_base = OTHER; note = 2'-O-methylguanosine-3'-phosphate
  modified_base 17: mod_base = OTHER; note = 2'-deoxy-2'-fluorouridine-3'-phosphate
  modified_base 18: mod_base = OTHER; note = 2'-O-methylguanosine-3'-phosphate
  modified_base 19: mod_base = OTHER; note = 2'-deoxy-2'-fluorouridine-3'-phosphate
  modified_base 20: mod_base = OTHER; note = 2'-O-methylguanosine-3'-phosphate
  modified_base 21: mod_base = OTHER; note = 2'-deoxy-2'-fluoroguanosine-3'-phosphate ((2S,4R)-1-[29-[[2-(acetylamino)-2-deoxy-beta-D-galactopyra nosyl]oxy]-14,14-bis[[3-[[3-[[5-[[2-(acetylamino)-2-deoxy-b eta-D-galactopyranosyl]oxy]-1-oxopentyl]amino]propyl]amino] -3-oxopropoxy]methyl]-1,12,19,25-tetraoxo-16-oxa-13,20,24-t riazanonacos-1-yl]-4-hydroxy-2-pyrrolidinyl)methyl ester
ccagaacaggaggctgtgtgg

SEQ ID NO: 397 - RNA, 21 nt, synthetic construct
  source 1..21: mol_type = other RNA
  modified_base 1: mod_base = OTHER; note = 2'-deoxy-2'-fluoroguanosine-3'-phosphorothioate
  modified_base 2: mod_base = OTHER; note = 2'-O-methylguanosine-3'-phosphorothioate
  modified_base 3: mod_base = OTHER; note = 2'-deoxy-2'-fluoroguanosine-3'-phosphate
  modified_base 4: mod_base = OTHER; note = 2'-O-methyluridine-3'-phosphate
  modified_base 5: mod_base = OTHER; note = 2'-deoxy-2'-fluorocytidine-3'-phosphate
  modified_base 6: mod_base = OTHER; note = 2'-O-methylguanosine-3'-phosphate
  modified_base 7: mod_base = OTHER; note = 2'-deoxy-2'-fluoroadenosine-3'-phosphate
  modified_base 8: mod_base = OTHER; note = 2'-O-methylcytidine-3'-phosphate
  modified_base 9: mod_base = OTHER; note = 2'-deoxy-2'-fluoroadenosine-3'-phosphate
  modified_base 10: mod_base = OTHER; note = 2'-deoxy-2'-fluorocytidine-3'-phosphate
  modified_base 11: mod_base = OTHER; note = 2'-deoxy-2'-fluoroadenosine-3'-phosphate
  modified_base 12: mod_base = OTHER; note = 2'-O-methyluridine-3'-phosphate
  modified_base 13: mod_base = OTHER; note = 2'-deoxy-2'-fluorocytidine-3'-phosphate
  modified_base 14: mod_base = OTHER; note = 2'-O-methyluridine-3'-phosphate
  modified_base 15: mod_base = OTHER; note = 2'-deoxy-2'-fluoroguanosine-3'-phosphate
  modified_base 16: mod_base = OTHER; note = 2'-O-methyluridine-3'-phosphate
  modified_base 17: mod_base = OTHER; note = 2'-deoxy-2'-fluoroguanosine-3'-phosphate
  modified_base 18: mod_base = OTHER; note = 2'-O-methylguanosine-3'-phosphate
  modified_base 19: mod_base = OTHER; note = 2'-deoxy-2'-fluoroguanosine-3'-phosphate
  modified_base 20: mod_base = OTHER; note = 2'-O-methylguanosine-3'-phosphate
  modified_base 21: mod_base = OTHER; note = 2'-deoxy-2'-fluoroadenosine-3'-phosphate ((2S,4R)-1-[29-[[2-(acetylamino)-2-deoxy-beta-D-galactopyra nosyl]oxy]-14,14-bis[[3-[[3-[[5-[[2-(acetylamino)-2-deoxy-b eta-D-galactopyranosyl]oxy]-1-oxopentyl]amino]propyl]amino] -3-oxopropoxy]methyl]-1,12,19,25-tetraoxo-16-oxa-13,20,24-t riazanonacos-1-yl]-4-hydroxy-2-pyrrolidinyl)methyl ester
gggtcgacacatctgtgggga

SEQ ID NO: 398 - RNA, 21 nt, synthetic construct
  source 1..21: mol_type = other RNA
  modified_base 1: mod_base = OTHER; note = 2'-deoxy-2'-fluorocytidine-3'-phosphorothioate
  modified_base 2: mod_base = OTHER; note = 2'-O-methylcytidine-3'-phosphorothioate
  modified_base 3: mod_base = OTHER; note = 2'-deoxy-2'-fluorocytidine-3'-phosphate
  modified_base 4: mod_base = OTHER; note = 2'-O-methylcytidine-3'-phosphate
  modified_base 5: mod_base = OTHER; note = 2'-deoxy-2'-fluoroadenosine-3'-phosphate
  modified_base 6: mod_base = OTHER; note = 2'-O-methyladenosine-3'-phosphate
  modified_base 7: mod_base = OTHER; note = 2'-deoxy-2'-fluorocytidine-3'-phosphate
  modified_base 8: mod_base = OTHER; note = 2'-O-methylguanosine-3'-phosphate
  modified_base 9: mod_base = OTHER; note = 2'-deoxy-2'-fluoroguanosine-3'-phosphate
  modified_base 10: mod_base = OTHER; note = 2'-deoxy-2'-fluorocytidine-3'-phosphate
  modified_base 11: mod_base = OTHER; note = 2'-deoxy-2'-fluorocytidine-3'-phosphate
  modified_base 12: mod_base = OTHER; note = 2'-O-methyluridine-3'-phosphate
  modified_base 13: mod_base = OTHER; note = 2'-deoxy-2'-fluoroguanosine-3'-phosphate
  modified_base 14: mod_base = OTHER; note = 2'-O-methylguanosine-3'-phosphate
  modified_base 15: mod_base = OTHER; note = 2'-deoxy-2'-fluoroadenosine-3'-phosphate
  modified_base 16: mod_base = OTHER; note = 2'-O-methyluridine-3'-phosphate
  modified_base 17: mod_base = OTHER; note = 2'-deoxy-2'-fluoroguanosine-3'-phosphate
  modified_base 18: mod_base = OTHER; note = 2'-O-methyladenosine-3'-phosphate
  modified_base 19: mod_base = OTHER; note = 2'-deoxy-2'-fluoroguanosine-3'-phosphate
  modified_base 20: mod_base = OTHER; note = 2'-O-methyladenosine-3'-phosphate
  modified_base 21: mod_base = OTHER; note = 2'-deoxy-2'-fluoroadenosine-3'-phosphate ((2S,4R)-1-[29-[[2-(acetylamino)-2-deoxy-beta-D-galactopyra nosyl]oxy]-14,14-bis[[3-[[3-[[5-[[2-(acetylamino)-2-deoxy-b eta-D-galactopyranosyl]oxy]-1-oxopentyl]amino]propyl]amino] -3-oxopropoxy]methyl]-1,12,19,25-tetraoxo-16-oxa-13,20,24-t riazanonacos-1-yl]-4-hydroxy-2-pyrrolidinyl)methyl ester
ccccaacggcctggatgagaa

SEQ ID NO: 399 - RNA, 21 nt, synthetic construct
  source 1..21: mol_type = other RNA
  modified_base 1: mod_base = OTHER; note = 2'-deoxy-2'-fluoroguanosine-3'-phosphorothioate
  modified_base 2: mod_base = OTHER; note = 2'-O-methylcytidine-3'-phosphorothioate
  modified_base 3: mod_base = OTHER; note = 2'-deoxy-2'-fluorocytidine-3'-phosphate
  modified_base 4: mod_base = OTHER; note = 2'-O-methylcytidine-3'-phosphate
  modified_base 5: mod_base = OTHER; note = 2'-deoxy-2'-fluorocytidine-3'-phosphate
  modified_base 6: mod_base = OTHER; note = 2'-O-methyladenosine-3'-phosphate
  modified_base 7: mod_base = OTHER; note = 2'-deoxy-2'-fluoroadenosine-3'-phosphate
  modified_base 8: mod_base = OTHER; note = 2'-O-methylcytidine-3'-phosphate
  modified_base 9: mod_base = OTHER; note = 2'-deoxy-2'-fluoroguanosine-3'-phosphate
  modified_base 10: mod_base = OTHER; note = 2'-deoxy-2'-fluoroguanosine-3'-phosphate
  modified_base 11: mod_base = OTHER; note = 2'-deoxy-2'-fluorocytidine-3'-phosphate
  modified_base 12: mod_base = OTHER; note = 2'-O-methylcytidine-3'-phosphate
  modified_base 13: mod_base = OTHER; note = 2'-deoxy-2'-fluorouridine-3'-phosphate
  modified_base 14: mod_base = OTHER; note = 2'-O-methylguanosine-3'-phosphate
  modified_base 15: mod_base = OTHER; note = 2'-deoxy-2'-fluoroguanosine-3'-phosphate
  modified_base 16: mod_base = OTHER; note = 2'-O-methyladenosine-3'-phosphate
  modified_base 17: mod_base = OTHER; note = 2'-deoxy-2'-fluorouridine-3'-phosphate
  modified_base 18: mod_base = OTHER; note = 2'-O-methylguanosine-3'-phosphate
  modified_base 19: mod_base = OTHER; note = 2'-deoxy-2'-fluoroadenosine-3'-phosphate
  modified_base 20: mod_base = OTHER; note = 2'-O-methylguanosine-3'-phosphate
  modified_base 21: mod_base = OTHER; note = 2'-deoxy-2'-fluoroadenosine-3'-phosphate ((2S,4R)-1-[29-[[2-(acetylamino)-2-deoxy-beta-D-galactopyra nosyl]oxy]-14,14-bis[[3-[[3-[[5-[[2-(acetylamino)-2-deoxy-b eta-D-galactopyranosyl]oxy]-1-oxopentyl]amino]propyl]amino] -3-oxopropoxy]methyl]-1,12,19,25-tetraoxo-16-oxa-13,20,24-t riazanonacos-1-yl]-4-hydroxy-2-pyrrolidinyl)methyl ester
gccccaacggcctggatgaga

SEQ ID NO: 400 - RNA, 21 nt, synthetic construct
  source 1..21: mol_type = other RNA
  modified_base 1: mod_base = OTHER; note = 2'-deoxy-2'-fluorocytidine-3'-phosphorothioate
  modified_base 2: mod_base = OTHER; note = 2'-O-methyluridine-3'-phosphorothioate
  modified_base 3: mod_base = OTHER; note = 2'-deoxy-2'-fluoroguanosine-3'-phosphate
  modified_base 4: mod_base = OTHER; note = 2'-O-methylcytidine-3'-phosphate
  modified_base 5: mod_base = OTHER; note = 2'-deoxy-2'-fluorocytidine-3'-phosphate
  modified_base 6: mod_base = OTHER; note = 2'-O-methylcytidine-3'-phosphate
  modified_base 7: mod_base = OTHER; note = 2'-deoxy-2'-fluorouridine-3'-phosphate
  modified_base 8: mod_base = OTHER; note = 2'-O-methylguanosine-3'-phosphate
  modified_base 9: mod_base = OTHER; note = 2'-deoxy-2'-fluoroguanosine-3'-phosphate
  modified_base 10: mod_base = OTHER; note = 2'-deoxy-2'-fluoroadenosine-3'-phosphate
  modified_base 11: mod_base = OTHER; note = 2'-deoxy-2'-fluoroguanosine-3'-phosphate
  modified_base 12: mod_base = OTHER; note = 2'-O-methyladenosine-3'-phosphate
  modified_base 13: mod_base = OTHER; note = 2'-deoxy-2'-fluoroguanosine-3'-phosphate
  modified_base 14: mod_base = OTHER; note = 2'-O-methyluridine-3'-phosphate
  modified_base 15: mod_base = OTHER; note = 2'-deoxy-2'-fluorouridine-3'-phosphate
  modified_base 16: mod_base = OTHER; note = 2'-O-methylcytidine-3'-phosphate
  modified_base 17: mod_base = OTHER; note = 2'-deoxy-2'-fluorocytidine-3'-phosphate
  modified_base 18: mod_base = OTHER; note = 2'-O-methyluridine-3'-phosphate
  modified_base 19: mod_base = OTHER; note = 2'-deoxy-2'-fluorocytidine-3'-phosphate
  modified_base 20: mod_base = OTHER; note = 2'-O-methyluridine-3'-phosphate
  modified_base 21: mod_base = OTHER; note = 2'-deoxy-2'-fluoroadenosine-3'-phosphate ((2S,4R)-1-[29-[[2-(acetylamino)-2-deoxy-beta-D-galactopyra nosyl]oxy]-14,14-bis[[3-[[3-[[5-[[2-(acetylamino)-2-deoxy-b eta-D-galactopyranosyl]oxy]-1-oxopentyl]amino]propyl]amino] -3-oxopropoxy]methyl]-1,12,19,25-tetraoxo-16-oxa-13,20,24-t riazanonacos-1-yl]-4-hydroxy-2-pyrrolidinyl)methyl ester
ctgccctggagagttcctcta

SEQ ID NO: 401 - RNA, 21 nt, synthetic construct
  source 1..21: mol_type = other RNA
  modified_base 1: mod_base = OTHER; note = 2'-deoxy-2'-fluorocytidine-3'-phosphorothioate
  modified_base 2: mod_base = OTHER; note = 2'-O-methylguanosine-3'-phosphorothioate
  modified_base 3: mod_base = OTHER; note = 2'-deoxy-2'-fluoroguanosine-3'-phosphate
  modified_base 4: mod_base = OTHER; note = 2'-O-methylguanosine-3'-phosphate
  modified_base 5: mod_base = OTHER; note = 2'-deoxy-2'-fluoroguanosine-3'-phosphate
  modified_base 6: mod_base = OTHER; note = 2'-O-methyluridine-3'-phosphate
  modified_base 7: mod_base = OTHER; note = 2'-deoxy-2'-fluorocytidine-3'-phosphate
  modified_base 8: mod_base = OTHER; note = 2'-O-methylguanosine-3'-phosphate
  modified_base 9: mod_base = OTHER; note = 2'-deoxy-2'-fluoroadenosine-3'-phosphate
  modified_base 10: mod_base = OTHER; note = 2'-deoxy-2'-fluorocytidine-3'-phosphate
  modified_base 11: mod_base = OTHER; note = 2'-deoxy-2'-fluoroadenosine-3'-phosphate
  modified_base 12: mod_base = OTHER; note = 2'-O-methylcytidine-3'-phosphate
  modified_base 13: mod_base = OTHER; note = 2'-deoxy-2'-fluoroadenosine-3'-phosphate
  modified_base 14: mod_base = OTHER; note = 2'-O-methyluridine-3'-phosphate
  modified_base 15: mod_base = OTHER; note = 2'-deoxy-2'-fluorocytidine-3'-phosphate
  modified_base 16: mod_base = OTHER; note = 2'-O-methyluridine-3'-phosphate
  modified_base 17: mod_base = OTHER; note = 2'-deoxy-2'-fluoroguanosine-3'-phosphate
  modified_base 18: mod_base = OTHER; note = 2'-O-methyluridine-3'-phosphate
  modified_base 19: mod_base = OTHER; note = 2'-deoxy-2'-fluoroguanosine-3'-phosphate
  modified_base 20: mod_base = OTHER; note = 2'-O-methylguanosine-3'-phosphate
  modified_base 21: mod_base = OTHER; note = 2'-deoxy-2'-fluoroadenosine-3'-phosphate ((2S,4R)-1-[29-[[2-(acetylamino)-2-deoxy-beta-D-galactopyra nosyl]oxy]-14,14-bis[[3-[[3-[[5-[[2-(acetylamino)-2-deoxy-b eta-D-galactopyranosyl]oxy]-1-oxopentyl]amino]propyl]amino] -3-oxopropoxy]methyl]-1,12,19,25-tetraoxo-16-oxa-13,20,24-t riazanonacos-1-yl]-4-hydroxy-2-pyrrolidinyl)methyl ester
cggggtcgacacatctgtgga

SEQ ID NO: 402 - RNA, 21 nt, synthetic construct
  source 1..21: mol_type = other RNA
  modified_base 1: mod_base = OTHER; note = 2'-deoxy-2'-fluorouridine-3'-phosphorothioate
  modified_base 2: mod_base = OTHER; note = 2'-O-methyluridine-3'-phosphorothioate
  modified_base 3: mod_base = OTHER; note = 2'-deoxy-2'-fluorouridine-3'-phosphate
  modified_base 4: mod_base = OTHER; note = 2'-O-methylcytidine-3'-phosphate
  modified_base 5: mod_base = OTHER; note = 2'-deoxy-2'-fluorocytidine-3'-phosphate
  modified_base 6: mod_base = OTHER; note = 2'-O-methyluridine-3'-phosphate
  modified_base 7: mod_base = OTHER; note = 2'-deoxy-2'-fluoroadenosine-3'-phosphate
  modified_base 8: mod_base = OTHER; note = 2'-O-methylguanosine-3'-phosphate
  modified_base 9: mod_base = OTHER; note = 2'-deoxy-2'-fluoroguanosine-3'-phosphate
  modified_base 10: mod_base = OTHER; note = 2'-deoxy-2'-fluoroguanosine-3'-phosphate
  modified_base 11: mod_base = OTHER; note = 2'-deoxy-2'-fluorouridine-3'-phosphate
  modified_base 12: mod_base = OTHER; note = 2'-O-methyladenosine-3'-phosphate
  modified_base 13: mod_base = OTHER; note = 2'-deoxy-2'-fluorocytidine-3'-phosphate
  modified_base 14: mod_base = OTHER; note = 2'-O-methyladenosine-3'-phosphate
  modified_base 15: mod_base = OTHER; note = 2'-deoxy-2'-fluoroadenosine-3'-phosphate
  modified_base 16: mod_base = OTHER; note = 2'-O-methylguanosine-3'-phosphate
  modified_base 17: mod_base = OTHER; note = 2'-deoxy-2'-fluoroguanosine-3'-phosphate
  modified_base 18: mod_base = OTHER; note = 2'-O-methylcytidine-3'-phosphate
  modified_base 19: mod_base = OTHER; note = 2'-deoxy-2'-fluoroguanosine-3'-phosphate
  modified_base 20: mod_base = OTHER; note = 2'-O-methylguanosine-3'-phosphate
  modified_base 21: mod_base = OTHER; note = 2'-deoxy-2'-fluoroadenosine-3'-phosphate ((2S,4R)-1-[29-[[2-(acetylamino)-2-deoxy-beta-D-galactopyra nosyl]oxy]-14,14-bis[[3-[[3-[[5-[[2-(acetylamino)-2-deoxy-b eta-D-galactopyranosyl]oxy]-1-oxopentyl]amino]propyl]amino] -3-oxopropoxy]methyl]-1,12,19,25-tetraoxo-16-oxa-13,20,24-t riazanonacos-1-yl]-4-hydroxy-2-pyrrolidinyl)methyl ester
tttcctagggtacaaggcgga

SEQ ID NO: 403 - RNA, 21 nt, synthetic construct
  source 1..21: mol_type = other RNA
  modified_base 1: mod_base = OTHER; note = 2'-deoxy-2'-fluoroadenosine-3'-phosphorothioate
  modified_base 2: mod_base = OTHER; note = 2'-O-methylcytidine-3'-phosphorothioate
  modified_base 3: mod_base = OTHER; note = 2'-deoxy-2'-fluorouridine-3'-phosphate
  modified_base 4: mod_base = OTHER; note = 2'-O-methylguanosine-3'-phosphate
  modified_base 5: mod_base = OTHER; note = 2'-deoxy-2'-fluorocytidine-3'-phosphate
  modified_base 6: mod_base = OTHER; note = 2'-O-methylcytidine-3'-phosphate
  modified_base 7: mod_base = OTHER; note = 2'-deoxy-2'-fluorocytidine-3'-phosphate
  modified_base 8: mod_base = OTHER; note = 2'-O-methylcytidine-3'-phosphate
  modified_base 9: mod_base = OTHER; note = 2'-deoxy-2'-fluoroadenosine-3'-phosphate
  modified_base 10: mod_base = OTHER; note = 2'-deoxy-2'-fluoroadenosine-3'-phosphate
  modified_base 11: mod_base = OTHER; note = 2'-deoxy-2'-fluorocytidine-3'-phosphate
  modified_base 12: mod_base = OTHER; note = 2'-O-methylguanosine-3'-phosphate
  modified_base 13: mod_base = OTHER; note = 2'-deoxy-2'-fluoroguanosine-3'-phosphate
  modified_base 14: mod_base = OTHER; note = 2'-O-methylcytidine-3'-phosphate
  modified_base 15: mod_base = OTHER; note = 2'-deoxy-2'-fluorocytidine-3'-phosphate
  modified_base 16: mod_base = OTHER; note = 2'-O-methyluridine-3'-phosphate
  modified_base 17: mod_base = OTHER; note = 2'-deoxy-2'-fluoroguanosine-3'-phosphate
  modified_base 18: mod_base = OTHER; note = 2'-O-methylguanosine-3'-phosphate
  modified_base 19: mod_base = OTHER; note = 2'-deoxy-2'-fluoroadenosine-3'-phosphate
  modified_base 20: mod_base = OTHER; note = 2'-O-methyluridine-3'-phosphate
  modified_base 21: mod_base = OTHER; note = 2'-deoxy-2'-fluoroadenosine-3'-phosphate ((2S,4R)-1-[29-[[2-(acetylamino)-2-deoxy-beta-D-galactopyra nosyl]oxy]-14,14-bis[[3-[[3-[[5-[[2-(acetylamino)-2-deoxy-b eta-D-galactopyranosyl]oxy]-1-oxopentyl]amino]propyl]amino] -3-oxopropoxy]methyl]-1,12,19,25-tetraoxo-16-oxa-13,20,24-t riazanonacos-1-yl]-4-hydroxy-2-pyrrolidinyl)methyl ester
actgccccaacggcctggata

SEQ ID NO: 404 - RNA, 21 nt, synthetic construct
  source 1..21: mol_type = other RNA
  modified_base 1: mod_base = OTHER; note = 2'-deoxy-2'-fluoroguanosine-3'-phosphorothioate
  modified_base 2: mod_base = OTHER; note = 2'-O-methylguanosine-3'-phosphorothioate
  modified_base 3: mod_base = OTHER; note = 2'-deoxy-2'-fluoroguanosine-3'-phosphate
  modified_base 4: mod_base = OTHER; note = 2'-O-methylguanosine-3'-phosphate
  modified_base 5: mod_base = OTHER; note = 2'-deoxy-2'-fluorouridine-3'-phosphate
  modified_base 6: mod_base = OTHER; note = 2'-O-methylcytidine-3'-phosphate
  modified_base 7: mod_base = OTHER; note = 2'-deoxy-2'-fluoroguanosine-3'-phosphate
  modified_base 8: mod_base = OTHER; note = 2'-O-methyladenosine-3'-phosphate
  modified_base 9: mod_base = OTHER; note = 2'-deoxy-2'-fluorocytidine-3'-phosphate
  modified_base 10: mod_base = OTHER; note = 2'-deoxy-2'-fluoroadenosine-3'-phosphate
  modified_base 11: mod_base = OTHER; note = 2'-deoxy-2'-fluorocytidine-3'-phosphate
  modified_base 12: mod_base = OTHER; note = 2'-O-methyladenosine-3'-phosphate
  modified_base 13: mod_base = OTHER; note = 2'-deoxy-2'-fluorouridine-3'-phosphate
  modified_base 14: mod_base = OTHER; note = 2'-O-methylcytidine-3'-phosphate
  modified_base 15: mod_base = OTHER; note = 2'-deoxy-2'-fluorouridine-3'-phosphate
  modified_base 16: mod_base = OTHER; note = 2'-O-methylguanosine-3'-phosphate
  modified_base 17: mod_base = OTHER; note = 2'-deoxy-2'-fluorouridine-3'-phosphate
  modified_base 18: mod_base = OTHER; note = 2'-O-methylguanosine-3'-phosphate
  modified_base 19: mod_base = OTHER; note = 2'-deoxy-2'-fluoroguanosine-3'-phosphate
  modified_base 20: mod_base = OTHER; note = 2'-O-methylguanosine-3'-phosphate
  modified_base 21: mod_base = OTHER; note = 2'-deoxy-2'-fluoroadenosine-3'-phosphate ((2S,4R)-1-[29-[[2-(acetylamino)-2-deoxy-beta-D-galactopyra nosyl]oxy]-14,14-bis[[3-[[3-[[5-[[2-(acetylamino)-2-deoxy-b eta-D-galactopyranosyl]oxy]-1-oxopentyl]amino]propyl]amino] -3-oxopropoxy]methyl]-1,12,19,25-tetraoxo-16-oxa-13,20,24-t riazanonacos-1-yl]-4-hydroxy-2-pyrrolidinyl)methyl ester
ggggtcgacacatctgtggga

SEQ ID NO: 405 - RNA, 21 nt, synthetic construct
  source 1..21: mol_type = other RNA
  modified_base 1: mod_base = OTHER; note = 2'-deoxy-2'-fluorocytidine-3'-phosphorothioate
  modified_base 2: mod_base = OTHER; note = 2'-O-methyluridine-3'-phosphorothioate
  modified_base 3: mod_base = OTHER; note = 2'-deoxy-2'-fluoroguanosine-3'-phosphate
  modified_base 4: mod_base = OTHER; note = 2'-O-methylcytidine-3'-phosphate
  modified_base 5: mod_base = OTHER; note = 2'-deoxy-2'-fluorocytidine-3'-phosphate
  modified_base 6: mod_base = OTHER; note = 2'-O-methylcytidine-3'-phosphate
  modified_base 7: mod_base = OTHER; note = 2'-deoxy-2'-fluorocytidine-3'-phosphate
  modified_base 8: mod_base = OTHER; note = 2'-O-methyladenosine-3'-phosphate
  modified_base 9: mod_base = OTHER; note = 2'-deoxy-2'-fluoroadenosine-3'-phosphate
  modified_base 10: mod_base = OTHER; note = 2'-deoxy-2'-fluorocytidine-3'-phosphate
  modified_base 11: mod_base = OTHER; note = 2'-deoxy-2'-fluoroguanosine-3'-phosphate
  modified_base 12: mod_base = OTHER; note = 2'-O-methylguanosine-3'-phosphate
  modified_base 13: mod_base = OTHER; note = 2'-deoxy-2'-fluorocytidine-3'-phosphate
  modified_base 14: mod_base = OTHER; note = 2'-O-methylcytidine-3'-phosphate
  modified_base 15: mod_base = OTHER; note = 2'-deoxy-2'-fluorouridine-3'-phosphate
  modified_base 16: mod_base = OTHER; note = 2'-O-methylguanosine-3'-phosphate
  modified_base 17: mod_base = OTHER; note = 2'-deoxy-2'-fluoroguanosine-3'-phosphate
  modified_base 18: mod_base = OTHER; note = 2'-O-methyladenosine-3'-phosphate
  modified_base 19: mod_base = OTHER; note = 2'-deoxy-2'-fluorouridine-3'-phosphate
  modified_base 20: mod_base = OTHER; note = 2'-O-methylguanosine-3'-phosphate
  modified_base 21: mod_base = OTHER; note = 2'-deoxy-2'-fluoroadenosine-3'-phosphate ((2S,4R)-1-[29-[[2-(acetylamino)-2-deoxy-beta-D-galactopyra nosyl]oxy]-14,14-bis[[3-[[3-[[5-[[2-(acetylamino)-2-deoxy-b eta-D-galactopyranosyl]oxy]-1-oxopentyl]amino]propyl]amino] -3-oxopropoxy]methyl]-1,12,19,25-tetraoxo-16-oxa-13,20,24-t riazanonacos-1-yl]-4-hydroxy-2-pyrrolidinyl)methyl ester
ctgccccaacggcctggatga

SEQ ID NO: 406 - RNA, 21 nt, synthetic construct
  source 1..21: mol_type = other RNA
  modified_base 1: mod_base = OTHER; note = 2'-deoxy-2'-fluoroadenosine-3'-phosphorothioate
  modified_base 2: mod_base = OTHER; note = 2'-O-methyluridine-3'-phosphorothioate
  modified_base 3: mod_base = OTHER; note = 2'-deoxy-2'-fluorouridine-3'-phosphate
  modified_base 4: mod_base = OTHER; note = 2'-O-methyluridine-3'-phosphate
  modified_base 5: mod_base = OTHER; note = 2'-deoxy-2'-fluorocytidine-3'-phosphate
  modified_base 6: mod_base = OTHER; note = 2'-O-methylcytidine-3'-phosphate
  modified_base 7: mod_base = OTHER; note = 2'-deoxy-2'-fluorouridine-3'-phosphate
  modified_base 8: mod_base = OTHER; note = 2'-O-methyladenosine-3'-phosphate
  modified_base 9: mod_base = OTHER; note = 2'-deoxy-2'-fluoroguanosine-3'-phosphate
  modified_base 10: mod_base = OTHER; note = 2'-deoxy-2'-fluoroguanosine-3'-phosphate
  modified_base 11: mod_base = OTHER; note = 2'-deoxy-2'-fluoroguanosine-3'-phosphate
  modified_base 12: mod_base = OTHER; note = 2'-O-methyluridine-3'-phosphate
  modified_base 13: mod_base = OTHER; note = 2'-deoxy-2'-fluoroadenosine-3'-phosphate
  modified_base 14: mod_base = OTHER; note = 2'-O-methylcytidine-3'-phosphate
  modified_base 15: mod_base = OTHER; note = 2'-deoxy-2'-fluoroadenosine-3'-phosphate
  modified_base 16: mod_base = OTHER; note = 2'-O-methyladenosine-3'-phosphate
  modified_base 17: mod_base = OTHER; note = 2'-deoxy-2'-fluoroguanosine-3'-phosphate
  modified_base 18: mod_base = OTHER; note = 2'-O-methylguanosine-3'-phosphate
  modified_base 19: mod_base = OTHER; note = 2'-deoxy-2'-fluorocytidine-3'-phosphate
  modified_base 20: mod_base = OTHER; note = 2'-O-methylguanosine-3'-phosphate
  modified_base 21: mod_base = OTHER; note = 2'-deoxy-2'-fluoroadenosine-3'-phosphate ((2S,4R)-1-[29-[[2-(acetylamino)-2-deoxy-beta-D-galactopyra nosyl]oxy]-14,14-bis[[3-[[3-[[5-[[2-(acetylamino)-2-deoxy-b eta-D-galactopyranosyl]oxy]-1-oxopentyl]amino]propyl]amino] -3-oxopropoxy]methyl]-1,12,19,25-tetraoxo-16-oxa-13,20,24-t riazanonacos-1-yl]-4-hydroxy-2-pyrrolidinyl)methyl ester
atttcctagggtacaaggcga

SEQ ID NO: 407 - RNA, 21 nt, synthetic construct
  source 1..21: mol_type = other RNA
  modified_base 1: mod_base = OTHER; note = 2'-deoxy-2'-fluorocytidine-3'-phosphorothioate
  modified_base 2: mod_base = OTHER; note = 2'-O-methylcytidine-3'-phosphorothioate
  modified_base 3: mod_base = OTHER; note = 2'-deoxy-2'-fluorocytidine-3'-phosphate
  modified_base 4: mod_base = OTHER; note = 2'-O-methylcytidine-3'-phosphate
  modified_base 5: mod_base = OTHER; note = 2'-deoxy-2'-fluorouridine-3'-phosphate
  modified_base 6: mod_base = OTHER; note = 2'-O-methylguanosine-3'-phosphate
  modified_base 7: mod_base = OTHER; note = 2'-deoxy-2'-fluorocytidine-3'-phosphate
  modified_base 8: mod_base = OTHER; note = 2'-O-methylcytidine-3'-phosphate
  modified_base 9: mod_base = OTHER; note = 2'-deoxy-2'-fluorocytidine-3'-phosphate
  modified_base 10: mod_base = OTHER; note = 2'-deoxy-2'-fluorouridine-3'-phosphate
  modified_base 11: mod_base = OTHER; note = 2'-deoxy-2'-fluoroguanosine-3'-phosphate
  modified_base 12: mod_base = OTHER; note = 2'-O-methylguanosine-3'-phosphate
  modified_base 13: mod_base = OTHER; note = 2'-deoxy-2'-fluoroadenosine-3'-phosphate
  modified_base 14: mod_base = OTHER; note = 2'-O-methylguanosine-3'-phosphate
  modified_base 15: mod_base = OTHER; note = 2'-deoxy-2'-fluoroadenosine-3'-phosphate
  modified_base 16: mod_base = OTHER; note = 2'-O-methylguanosine-3'-phosphate
  modified_base 17: mod_base = OTHER; note = 2'-deoxy-2'-fluorouridine-3'-phosphate
  modified_base 18: mod_base = OTHER; note = 2'-O-methyluridine-3'-phosphate
  modified_base 19: mod_base = OTHER; note = 2'-deoxy-2'-fluorocytidine-3'-phosphate
  modified_base 20: mod_base = OTHER; note = 2'-O-methylcytidine-3'-phosphate
  modified_base 21: mod_base = OTHER; note = 2'-deoxy-2'-fluorouridine-3'-phosphate ((2S,4R)-1-[29-[[2-(acetylamino)-2-deoxy-beta-D-galactopyra nosyl]oxy]-14,14-bis[[3-[[3-[[5-[[2-(acetylamino)-2-deoxy-b eta-D-galactopyranosyl]oxy]-1-oxopentyl]amino]propyl]amino] -3-oxopropoxy]methyl]-1,12,19,25-tetraoxo-16-oxa-13,20,24-t riazanonacos-1-yl]-4-hydroxy-2-pyrrolidinyl)methyl ester
cccctgccctggagagttcct

SEQ ID NO: 408 - RNA, 21 nt, synthetic construct
  source 1..21: mol_type = other RNA
  modified_base 1: mod_base = OTHER; note = 2'-deoxy-2'-fluorocytidine-3'-phosphorothioate
  modified_base 2: mod_base = OTHER; note = 2'-O-methylcytidine-3'-phosphorothioate
  modified_base 3: mod_base = OTHER; note = 2'-deoxy-2'-fluorocytidine-3'-phosphate
  modified_base 4: mod_base = OTHER; note = 2'-O-methyluridine-3'-phosphate
  modified_base 5: mod_base = OTHER; note = 2'-deoxy-2'-fluoroguanosine-3'-phosphate
  modified_base 6: mod_base = OTHER; note = 2'-O-methylcytidine-3'-phosphate
  modified_base 7: mod_base = OTHER; note = 2'-deoxy-2'-fluorocytidine-3'-phosphate
  modified_base 8: mod_base = OTHER; note = 2'-O-methylcytidine-3'-phosphate
  modified_base 9: mod_base = OTHER; note = 2'-deoxy-2'-fluorouridine-3'-phosphate
  modified_base 10: mod_base = OTHER; note = 2'-deoxy-2'-fluoroguanosine-3'-phosphate
  modified_base 11: mod_base = OTHER; note = 2'-deoxy-2'-fluoroguanosine-3'-phosphate
  modified_base 12: mod_base = OTHER; note = 2'-O-methyladenosine-3'-phosphate
  modified_base 13: mod_base = OTHER; note = 2'-deoxy-2'-fluoroguanosine-3'-phosphate
  modified_base 14: mod_base = OTHER; note = 2'-O-methyladenosine-3'-phosphate
  modified_base 15: mod_base = OTHER; note = 2'-deoxy-2'-fluoroguanosine-3'-phosphate
  modified_base 16: mod_base = OTHER; note = 2'-O-methyluridine-3'-phosphate
  modified_base 17: mod_base = OTHER; note = 2'-deoxy-2'-fluorouridine-3'-phosphate
  modified_base 18: mod_base = OTHER; note = 2'-O-methylcytidine-3'-phosphate
  modified_base 19: mod_base = OTHER; note = 2'-deoxy-2'-fluorocytidine-3'-phosphate
  modified_base 20: mod_base = OTHER; note = 2'-O-methyluridine-3'-phosphate
  modified_base 21: mod_base = OTHER; note = 2'-deoxy-2'-fluoroadenosine-3'-phosphate ((2S,4R)-1-[29-[[2-(acetylamino)-2-deoxy-beta-D-galactopyra nosyl]oxy]-14,14-bis[[3-[[3-[[5-[[2-(acetylamino)-2-deoxy-b eta-D-galactopyranosyl]oxy]-1-oxopentyl]amino]propyl]amino] -3-oxopropoxy]methyl]-1,12,19,25-tetraoxo-16-oxa-13,20,24-t riazanonacos-1-yl]-4-hydroxy-2-pyrrolidinyl)methyl ester
ccctgccctggagagttccta

SEQ ID NO: 409 - RNA, 21 nt, synthetic construct
  source 1..21: mol_type = other RNA
  modified_base 1: mod_base = OTHER; note = 2'-deoxy-2'-fluorocytidine-3'-phosphorothioate
  modified_base 2: mod_base = OTHER; note = 2'-O-methyladenosine-3'-phosphorothioate
  modified_base 3: mod_base = OTHER; note = 2'-deoxy-2'-fluorocytidine-3'-phosphate
  modified_base 4: mod_base = OTHER; note = 2'-O-methyluridine-3'-phosphate
  modified_base 5: mod_base = OTHER; note = 2'-deoxy-2'-fluoroguanosine-3'-phosphate
  modified_base 6: mod_base = OTHER; note = 2'-O-methyluridine-3'-phosphate
  modified_base 7: mod_base = OTHER; note = 2'-deoxy-2'-fluoroguanosine-3'-phosphate
  modified_base 8: mod_base = OTHER; note = 2'-O-methyladenosine-3'-phosphate
  modified_base 9: mod_base = OTHER; note = 2'-deoxy-2'-fluorocytidine-3'-phosphate
  modified_base 10: mod_base = OTHER; note = 2'-deoxy-2'-fluorouridine-3'-phosphate
  modified_base 11: mod_base = OTHER; note = 2'-deoxy-2'-fluoroguanosine-3'-phosphate
  modified_base 12: mod_base = OTHER; note = 2'-O-methyluridine-3'-phosphate
  modified_base 13: mod_base = OTHER; note = 2'-deoxy-2'-fluoroguanosine-3'-phosphate
  modified_base 14: mod_base = OTHER; note = 2'-O-methylguanosine-3'-phosphate
  modified_base 15: mod_base = OTHER; note = 2'-deoxy-2'-fluorocytidine-3'-phosphate
  modified_base 16: mod_base = OTHER; note = 2'-O-methylcytidine-3'-phosphate
  modified_base 17: mod_base = OTHER; note = 2'-deoxy-2'-fluorouridine-3'-phosphate
  modified_base 18: mod_base = OTHER; note = 2'-O-methylcytidine-3'-phosphate
  modified_base 19: mod_base = OTHER; note = 2'-deoxy-2'-fluorocytidine-3'-phosphate
  modified_base 20: mod_base = OTHER; note = 2'-O-methyladenosine-3'-phosphate
  modified_base 21: mod_base = OTHER; note = 2'-deoxy-2'-fluoroadenosine-3'-phosphate ((2S,4R)-1-[29-[[2-(acetylamino)-2-deoxy-beta-D-galactopyra nosyl]oxy]-14,14-bis[[3-[[3-[[5-[[2-(acetylamino)-2-deoxy-b eta-D-galactopyranosyl]oxy]-1-oxopentyl]amino]propyl]amino] -3-oxopropoxy]methyl]-1,12,19,25-tetraoxo-16-oxa-13,20,24-t riazanonacos-1-yl]-4-hydroxy-2-pyrrolidinyl)methyl ester
cactgtgactgtggcctccaa

SEQ ID NO: 410 - RNA, 21 nt, synthetic construct
  source 1..21: mol_type = other RNA
  modified_base 1: mod_base = OTHER; note = 2'-deoxy-2'-fluoroguanosine-3'-phosphorothioate
  modified_base 2: mod_base = OTHER; note = 2'-O-methylguanosine-3'-phosphorothioate
  modified_base 3: mod_base = OTHER; note = 2'-deoxy-2'-fluoroadenosine-3'-phosphate
  modified_base 4: mod_base = OTHER; note = 2'-O-methylcytidine-3'-phosphate
  modified_base 5: mod_base = OTHER; note = 2'-deoxy-2'-fluorouridine-3'-phosphate
  modified_base 6: mod_base = OTHER; note = 2'-O-methylguanosine-3'-phosphate
  modified_base 7: mod_base = OTHER; note = 2'-deoxy-2'-fluorocytidine-3'-phosphate
  modified_base 8: mod_base = OTHER; note = 2'-O-methylcytidine-3'-phosphate
  modified_base 9: mod_base = OTHER; note = 2'-deoxy-2'-fluorocytidine-3'-phosphate
  modified_base 10: mod_base = OTHER; note = 2'-deoxy-2'-fluorocytidine-3'-phosphate
  modified_base 11: mod_base = OTHER; note = 2'-deoxy-2'-fluoroadenosine-3'-phosphate
  modified_base 12: mod_base = OTHER; note = 2'-O-methyladenosine-3'-phosphate
  modified_base 13: mod_base = OTHER; note = 2'-deoxy-2'-fluorocytidine-3'-phosphate
  modified_base 14: mod_base = OTHER; note = 2'-O-methylguanosine-3'-phosphate
  modified_base 15: mod_base = OTHER; note = 2'-deoxy-2'-fluoroguanosine-3'-phosphate
  modified_base 16: mod_base = OTHER; note = 2'-O-methylcytidine-3'-phosphate
  modified_base 17: mod_base = OTHER; note = 2'-deoxy-2'-fluorocytidine-3'-phosphate
  modified_base 18: mod_base = OTHER; note = 2'-O-methyluridine-3'-phosphate
  modified_base 19: mod_base = OTHER; note = 2'-deoxy-2'-fluoroguanosine-3'-phosphate
  modified_base 20: mod_base = OTHER; note = 2'-O-methylguanosine-3'-phosphate
  modified_base 21: mod_base = OTHER; note = 2'-deoxy-2'-fluoroadenosine-3'-phosphate ((2S,4R)-1-[29-[[2-(acetylamino)-2-deoxy-beta-D-galactopyra nosyl]oxy]-14,14-bis[[3-[[3-[[5-[[2-(acetylamino)-2-deoxy-b eta-D-galactopyranosyl]oxy]-1-oxopentyl]amino]propyl]amino] -3-oxopropoxy]methyl]-1,12,19,25-tetraoxo-16-oxa-13,20,24-t riazanonacos-1-yl]-4-hydroxy-2-pyrrolidinyl)methyl ester
ggactgccccaacggcctgga

SEQ ID NO: 411 - RNA, 21 nt, synthetic construct
  source 1..21: mol_type = other RNA
  modified_base 1: mod_base = OTHER; note = 2'-deoxy-2'-fluoroguanosine-3'-phosphorothioate
  modified_base 2: mod_base = OTHER; note = 2'-O-methylguanosine-3'-phosphorothioate
  modified_base 3: mod_base = OTHER; note = 2'-deoxy-2'-fluorouridine-3'-phosphate
  modified_base 4: mod_base = OTHER; note = 2'-O-methyladenosine-3'-phosphate
  modified_base 5: mod_base = OTHER; note = 2'-deoxy-2'-fluorouridine-3'-phosphate
  modified_base 6: mod_base = OTHER; note = 2'-O-methyluridine-3'-phosphate
  modified_base 7: mod_base = OTHER; note = 2'-deoxy-2'-fluorouridine-3'-phosphate
  modified_base 8: mod_base = OTHER; note = 2'-O-methylcytidine-3'-phosphate
  modified_base 9: mod_base = OTHER; note = 2'-deoxy-2'-fluorocytidine-3'-phosphate
  modified_base 10: mod_base = OTHER; note = 2'-deoxy-2'-fluorouridine-3'-phosphate
  modified_base 11: mod_base = OTHER; note = 2'-deoxy-2'-fluoroadenosine-3'-phosphate
  modified_base 12: mod_base = OTHER; note = 2'-O-methylguanosine-3'-phosphate
  modified_base 13: mod_base = OTHER; note = 2'-deoxy-2'-fluoroguanosine-3'-phosphate
  modified_base 14: mod_base = OTHER; note = 2'-O-methylguanosine-3'-phosphate
  modified_base 15: mod_base = OTHER; note = 2'-deoxy-2'-fluorouridine-3'-phosphate
  modified_base 16: mod_base = OTHER; note = 2'-O-methyladenosine-3'-phosphate
  modified_base 17: mod_base = OTHER; note = 2'-deoxy-2'-fluorocytidine-3'-phosphate
  modified_base 18: mod_base = OTHER; note = 2'-O-methyladenosine-3'-phosphate
  modified_base 19: mod_base = OTHER; note = 2'-deoxy-2'-fluoroadenosine-3'-phosphate
  modified_base 20: mod_base = OTHER; note = 2'-O-methylguanosine-3'-phosphate
  modified_base 21: mod_base = OTHER; note = 2'-deoxy-2'-fluoroadenosine-3'-phosphate ((2S,4R)-1-[29-[[2-(acetylamino)-2-deoxy-beta-D-galactopyra nosyl]oxy]-14,14-bis[[3-[[3-[[5-[[2-(acetylamino)-2-deoxy-b eta-D-galactopyranosyl]oxy]-1-oxopentyl]amino]propyl]amino] -3-oxopropoxy]methyl]-1,12,19,25-tetraoxo-16-oxa-13,20,24-t riazanonacos-1-yl]-4-hydroxy-2-pyrrolidinyl)methyl ester
ggtatttcctagggtacaaga

SEQ ID NO: 412 - RNA, 21 nt, synthetic construct
  source 1..21: mol_type = other RNA
  modified_base 1: mod_base = OTHER; note = 2'-deoxy-2'-fluorocytidine-3'-phosphorothioate
  modified_base 2: mod_base = OTHER; note = 2'-O-methyladenosine-3'-phosphorothioate
  modified_base 3: mod_base = OTHER; note = 2'-deoxy-2'-fluorocytidine-3'-phosphate
  modified_base 4: mod_base = OTHER; note = 2'-O-methylcytidine-3'-phosphate
  modified_base 5: mod_base = OTHER; note = 2'-deoxy-2'-fluorouridine-3'-phosphate
  modified_base 6: mod_base = OTHER; note = 2'-O-methylcytidine-3'-phosphate
  modified_base 7: mod_base = OTHER; note = 2'-deoxy-2'-fluorocytidine-3'-phosphate
  modified_base 8: mod_base = OTHER; note = 2'-O-methylcytidine-3'-phosphate
  modified_base 9: mod_base = OTHER; note = 2'-deoxy-2'-fluoroadenosine-3'-phosphate
  modified_base 10: mod_base = OTHER; note = 2'-deoxy-2'-fluoroguanosine-3'-phosphate
  modified_base 11: mod_base = OTHER; note = 2'-deoxy-2'-fluoroadenosine-3'-phosphate
  modified_base 12: mod_base = OTHER; note = 2'-O-methyluridine-3'-phosphate
  modified_base 13: mod_base = OTHER; note = 2'-deoxy-2'-fluorocytidine-3'-phosphate
  modified_base 14: mod_base = OTHER; note = 2'-O-methyluridine-3'-phosphate
  modified_base 15: mod_base = OTHER; note = 2'-deoxy-2'-fluorocytidine-3'-phosphate
  modified_base 16: mod_base = OTHER; note = 2'-O-methylcytidine-3'-phosphate
  modified_base 17: mod_base = OTHER; note = 2'-deoxy-2'-fluorocytidine-3'-phosphate
  modified_base 18: mod_base = OTHER; note = 2'-O-methyluridine-3'-phosphate
  modified_base 19: mod_base = OTHER; note = 2'-deoxy-2'-fluorocytidine-3'-phosphate
  modified_base 20: mod_base = OTHER; note = 2'-O-methyladenosine-3'-phosphate
  modified_base 21: mod_base = OTHER; note = 2'-deoxy-2'-fluoroadenosine-3'-phosphate ((2S,4R)-1-[29-[[2-(acetylamino)-2-deoxy-beta-D-galactopyra nosyl]oxy]-14,14-bis[[3-[[3-[[5-[[2-(acetylamino)-2-deoxy-b eta-D-galactopyranosyl]oxy]-1-oxopentyl]amino]propyl]amino] -3-oxopropoxy]methyl]-1,12,19,25-tetraoxo-16-oxa-13,20,24-t riazanonacos-1-yl]-4-hydroxy-2-pyrrolidinyl)methyl ester
cacctcccagatctccctcaa

SEQ ID NO: 413 - RNA, 21 nt, synthetic construct
  source 1..21: mol_type = other RNA
  modified_base 1: mod_base = OTHER; note = 2'-deoxy-2'-fluorouridine-3'-phosphorothioate
  modified_base 2: mod_base = OTHER; note = 2'-O-methylguanosine-3'-phosphorothioate
  modified_base 3: mod_base = OTHER; note = 2'-deoxy-2'-fluoroguanosine-3'-phosphate
  modified_base 4: mod_base = OTHER; note = 2'-O-methyluridine-3'-phosphate
  modified_base 5: mod_base = OTHER; note = 2'-deoxy-2'-fluoroadenosine-3'-phosphate
  modified_base 6: mod_base = OTHER; note = 2'-O-methyluridine-3'-phosphate
  modified_base 7: mod_base = OTHER; note = 2'-deoxy-2'-fluorouridine-3'-phosphate
  modified_base 8: mod_base = OTHER; note = 2'-O-methyluridine-3'-phosphate
  modified_base 9: mod_base = OTHER; note = 2'-deoxy-2'-fluorocytidine-3'-phosphate
  modified_base 10: mod_base = OTHER; note = 2'-deoxy-2'-fluorocytidine-3'-phosphate
  modified_base 11: mod_base = OTHER; note = 2'-deoxy-2'-fluorouridine-3'-phosphate
  modified_base 12: mod_base = OTHER; note = 2'-O-methyladenosine-3'-phosphate
  modified_base 13: mod_base = OTHER; note = 2'-deoxy-2'-fluoroguanosine-3'-phosphate
  modified_base 14: mod_base = OTHER; note = 2'-O-methylguanosine-3'-phosphate
  modified_base 15: mod_base = OTHER; note = 2'-deoxy-2'-fluoroguanosine-3'-phosphate
  modified_base 16: mod_base = OTHER; note = 2'-O-methyluridine-3'-phosphate
  modified_base 17: mod_base = OTHER; note = 2'-deoxy-2'-fluoroadenosine-3'-phosphate
  modified_base 18: mod_base = OTHER; note = 2'-O-methylcytidine-3'-phosphate
  modified_base 19: mod_base = OTHER; note = 2'-deoxy-2'-fluoroadenosine-3'-phosphate
  modified_base 20: mod_base = OTHER; note = 2'-O-methyladenosine-3'-phosphate
  modified_base 21: mod_base = OTHER; note = 2'-deoxy-2'-fluoroadenosine-3'-phosphate ((2S,4R)-1-[29-[[2-(acetylamino)-2-deoxy-beta-D-galactopyra nosyl]oxy]-14,14-bis[[3-[[3-[[5-[[2-(acetylamino)-2-deoxy-b eta-D-galactopyranosyl]oxy]-1-oxopentyl]amino]propyl]amino] -3-oxopropoxy]methyl]-1,12,19,25-tetraoxo-16-oxa-13,20,24-t riazanonacos-1-yl]-4-hydroxy-2-pyrrolidinyl)methyl ester
tggtatttcctagggtacaaa

SEQ ID NO: 414 - RNA, 21 nt, synthetic construct
  source 1..21: mol_type = other RNA
  modified_base 1: mod_base = OTHER; note = 2'-deoxy-2'-fluoroguanosine-3'-phosphorothioate
  modified_base 2: mod_base = OTHER; note = 2'-O-methyluridine-3'-phosphorothioate
  modified_base 3: mod_base = OTHER; note = 2'-deoxy-2'-fluoroadenosine-3'-phosphate
  modified_base 4: mod_base = OTHER; note = 2'-O-methyluridine-3'-phosphate
  modified_base 5: mod_base = OTHER; note = 2'-deoxy-2'-fluorouridine-3'-phosphate
  modified_base 6: mod_base = OTHER; note = 2'-O-methyluridine-3'-phosphate
  modified_base 7: mod_base = OTHER; note = 2'-deoxy-2'-fluorocytidine-3'-phosphate
  modified_base 8: mod_base = OTHER; note = 2'-O-methylcytidine-3'-phosphate
  modified_base 9: mod_base = OTHER; note = 2'-deoxy-2'-fluorouridine-3'-phosphate
  modified_base 10: mod_base = OTHER; note = 2'-deoxy-2'-fluoroadenosine-3'-phosphate
  modified_base 11: mod_base = OTHER; note = 2'-deoxy-2'-fluoroguanosine-3'-phosphate
  modified_base 12: mod_base = OTHER; note = 2'-O-methylguanosine-3'-phosphate
  modified_base 13: mod_base = OTHER; note = 2'-deoxy-2'-fluoroguanosine-3'-phosphate
  modified_base 14: mod_base = OTHER; note = 2'-O-methyluridine-3'-phosphate
  modified_base 15: mod_base = OTHER; note = 2'-deoxy-2'-fluoroadenosine-3'-phosphate
  modified_base 16: mod_base = OTHER; note = 2'-O-methylcytidine-3'-phosphate
  modified_base 17: mod_base = OTHER; note = 2'-deoxy-2'-fluoroadenosine-3'-phosphate
  modified_base 18: mod_base = OTHER; note = 2'-O-methyladenosine-3'-phosphate
  modified_base 19: mod_base = OTHER; note = 2'-deoxy-2'-fluoroguanosine-3'-phosphate
  modified_base 20: mod_base = OTHER; note = 2'-O-methylguanosine-3'-phosphate
  modified_base 21: mod_base = OTHER; note = 2'-deoxy-2'-fluoroadenosine-3'-phosphate ((2S,4R)-1-[29-[[2-(acetylamino)-2-deoxy-beta-D-galactopyra nosyl]oxy]-14,14-bis[[3-[[3-[[5-[[2-(acetylamino)-2-deoxy-b eta-D-galactopyranosyl]oxy]-1-oxopentyl]amino]propyl]amino] -3-oxopropoxy]methyl]-1,12,19,25-tetraoxo-16-oxa-13,20,24-t riazanonacos-1-yl]-4-hydroxy-2-pyrrolidinyl)methyl ester
gtatttcctagggtacaagga

SEQ ID NO: 415 - RNA, 21 nt, synthetic construct
  source 1..21: mol_type = other RNA
  modified_base 1: mod_base = OTHER; note = 2'-deoxy-2'-fluorocytidine-3'-phosphorothioate
  modified_base 2: mod_base = OTHER; note = 2'-O-methyluridine-3'-phosphorothioate
  modified_base 3: mod_base = OTHER; note = 2'-deoxy-2'-fluorocytidine-3'-phosphate
  modified_base 4: mod_base = OTHER; note = 2'-O-methylcytidine-3'-phosphate
  modified_base 5: mod_base = OTHER; note = 2'-deoxy-2'-fluoroguanosine-3'-phosphate
  modified_base 6: mod_base = OTHER; note = 2'-O-methyladenosine-3'-phosphate
  modified_base 7: mod_base = OTHER; note = 2'-deoxy-2'-fluoroguanosine-3'-phosphate
  modified_base 8: mod_base = OTHER; note = 2'-O-methylguanosine-3'-phosphate
  modified_base 9: mod_base = OTHER; note = 2'-deoxy-2'-fluoroguanosine-3'-phosphate
  modified_base 10: mod_base = OTHER; note = 2'-deoxy-2'-fluorouridine-3'-phosphate
  modified_base 11: mod_base = OTHER; note = 2'-deoxy-2'-fluoroguanosine-3'-phosphate
  modified_base 12: mod_base = OTHER; note = 2'-O-methyladenosine-3'-phosphate
  modified_base 13: mod_base = OTHER; note = 2'-deoxy-2'-fluoroguanosine-3'-phosphate
  modified_base 14: mod_base = OTHER; note = 2'-O-methyluridine-3'-phosphate
  modified_base 15: mod_base = OTHER; note = 2'-deoxy-2'-fluoroguanosine-3'-phosphate
  modified_base 16: mod_base = OTHER; note = 2'-O-methylguanosine-3'-phosphate
  modified_base 17: mod_base = OTHER; note = 2'-deoxy-2'-fluorocytidine-3'-phosphate
  modified_base 18: mod_base = OTHER; note = 2'-O-methylcytidine-3'-phosphate
  modified_base 19: mod_base = OTHER; note = 2'-deoxy-2'-fluoroadenosine-3'-phosphate
  modified_base 20: mod_base = OTHER; note = 2'-O-methyluridine-3'-phosphate
  modified_base 21: mod_base = OTHER; note = 2'-deoxy-2'-fluoroadenosine-3'-phosphate ((2S,4R)-1-[29-[[2-(acetylamino)-2-deoxy-beta-D-galactopyra nosyl]oxy]-14,14-bis[[3-[[3-[[5-[[2-(acetylamino)-2-deoxy-b eta-D-galactopyranosyl]oxy]-1-oxopentyl]amino]propyl]amino] -3-oxopropoxy]methyl]-1,12,19,25-tetraoxo-16-oxa-13,20,24-t riazanonacos-1-yl]-4-hydroxy-2-pyrrolidinyl)methyl ester
ctccgagggtgagtggccata

SEQ ID NO: 416 - RNA, 21 nt, synthetic construct
  source 1..21: mol_type = other RNA
  modified_base 1: mod_base = OTHER; note = 2'-deoxy-2'-fluorouridine-3'-phosphorothioate
  modified_base 2: mod_base = OTHER; note = 2'-O-methylguanosine-3'-phosphorothioate
  modified_base 3: mod_base = OTHER; note = 2'-deoxy-2'-fluorocytidine-3'-phosphate
  modified_base 4: mod_base = OTHER; note = 2'-O-methylcytidine-3'-phosphate
  modified_base 5: mod_base = OTHER; note = 2'-deoxy-2'-fluorocytidine-3'-phosphate
  modified_base 6: mod_base = OTHER; note = 2'-O-methylcytidine-3'-phosphate
  modified_base 7: mod_base = OTHER; note = 2'-deoxy-2'-fluoroadenosine-3'-phosphate
  modified_base 8: mod_base = OTHER; note = 2'-O-methyladenosine-3'-phosphate
  modified_base 9: mod_base = OTHER; note = 2'-deoxy-2'-fluorocytidine-3'-phosphate
  modified_base 10: mod_base = OTHER; note = 2'-deoxy-2'-fluoroguanosine-3'-phosphate
  modified_base 11: mod_base = OTHER; note = 2'-deoxy-2'-fluoroguanosine-3'-phosphate
  modified_base 12: mod_base = OTHER; note = 2'-O-methylcytidine-3'-phosphate
  modified_base 13: mod_base = OTHER; note = 2'-deoxy-2'-fluorocytidine-3'-phosphate
  modified_base 14: mod_base = OTHER; note = 2'-O-methyluridine-3'-phosphate
  modified_base 15: mod_base = OTHER; note = 2'-deoxy-2'-fluoroguanosine-3'-phosphate
  modified_base 16: mod_base = OTHER; note = 2'-O-methylguanosine-3'-phosphate
  modified_base 17: mod_base = OTHER; note = 2'-deoxy-2'-fluoroadenosine-3'-phosphate
  modified_base 18: mod_base = OTHER; note = 2'-O-methyluridine-3'-phosphate
  modified_base 19: mod_base = OTHER; note = 2'-deoxy-2'-fluoroguanosine-3'-phosphate
  modified_base 20: mod_base = OTHER; note = 2'-O-methyladenosine-3'-phosphate
  modified_base 21: mod_base = OTHER; note = 2'-deoxy-2'-fluoroadenosine-3'-phosphate ((2S,4R)-1-[29-[[2-(acetylamino)-2-deoxy-beta-D-galactopyra nosyl]oxy]-14,14-bis[[3-[[3-[[5-[[2-(acetylamino)-2-deoxy-b eta-D-galactopyranosyl]oxy]-1-oxopentyl]amino]propyl]amino] -3-oxopropoxy]methyl]-1,12,19,25-tetraoxo-16-oxa-13,20,24-t riazanonacos-1-yl]-4-hydroxy-2-pyrrolidinyl)methyl ester
tgccccaacggcctggatgaa

SEQ ID NO: 417 - RNA, 21 nt, synthetic construct
  source 1..21: mol_type = other RNA
  modified_base 1: mod_base = OTHER; note = 2'-deoxy-2'-fluorocytidine-3'-phosphorothioate
  modified_base 2: mod_base = OTHER; note = 2'-O-methylcytidine-3'-phosphorothioate
  modified_base 3: mod_base = OTHER; note = 2'-deoxy-2'-fluorouridine-3'-phosphate
  modified_base 4: mod_base = OTHER; note = 2'-O-methylguanosine-3'-phosphate
  modified_base 5: mod_base = OTHER; note = 2'-deoxy-2'-fluorocytidine-3'-phosphate
  modified_base 6: mod_base = OTHER; note = 2'-O-methylcytidine-3'-phosphate
  modified_base 7: mod_base = OTHER; note = 2'-deoxy-2'-fluorocytidine-3'-phosphate
  modified_base 8: mod_base = OTHER; note = 2'-O-methyluridine-3'-phosphate
  modified_base 9: mod_base = OTHER; note = 2'-deoxy-2'-fluoroguanosine-3'-phosphate
  modified_base 10: mod_base = OTHER; note = 2'-deoxy-2'-fluoroguanosine-3'-phosphate
  modified_base 11: mod_base = OTHER; note = 2'-deoxy-2'-fluoroadenosine-3'-phosphate
  modified_base 12: mod_base = OTHER; note = 2'-O-methylguanosine-3'-phosphate
  modified_base 13: mod_base = OTHER; note = 2'-deoxy-2'-fluoroadenosine-3'-phosphate
  modified_base 14: mod_base = OTHER; note = 2'-O-methylguanosine-3'-phosphate
  modified_base 15: mod_base = OTHER; note = 2'-deoxy-2'-fluorouridine-3'-phosphate
  modified_base 16: mod_base = OTHER; note = 2'-O-methyluridine-3'-phosphate
  modified_base 17: mod_base = OTHER; note = 2'-deoxy-2'-fluorocytidine-3'-phosphate
  modified_base 18: mod_base = OTHER; note = 2'-O-methylcytidine-3'-phosphate
  modified_base 19: mod_base = OTHER; note = 2'-deoxy-2'-fluorouridine-3'-phosphate
  modified_base 20: mod_base = OTHER; note = 2'-O-methylcytidine-3'-phosphate
  modified_base 21: mod_base = OTHER; note = 2'-deoxy-2'-fluorouridine-3'-phosphate ((2S,4R)-1-[29-[[2-(acetylamino)-2-deoxy-beta-D-galactopyra nosyl]oxy]-14,14-bis[[3-[[3-[[5-[[2-(acetylamino)-2-deoxy-b eta-D-galactopyranosyl]oxy]-1-oxopentyl]amino]propyl]amino] -3-oxopropoxy]methyl]-1,12,19,25-tetraoxo-16-oxa-13,20,24-t riazanonacos-1-yl]-4-hydroxy-2-pyrrolidinyl)methyl ester
cctgccctggagagttcctct

SEQ ID NO: 418 - DNA, 21 bp, synthetic construct
  source 1..21: mol_type = other DNA
  modified_base 1: mod_base = OTHER; note = uridine-3'-phosphate
  modified_base 2: mod_base = OTHER; note = guanosine-3'-phosphate
  modified_base 3: mod_base = OTHER; note = 2'-O-methyluridine-3'-phosphate
  modified_base 4: mod_base = OTHER; note = adenosine-3'-phosphate
  modified_base 5: mod_base = OTHER; note = cytidine-3'-phosphate
  modified_base 6: mod_base = OTHER; note = cytidine-3'-phosphate
  modified_base 7: mod_base = OTHER; note = cytidine-3'-phosphate
  modified_base 8: mod_base = OTHER; note = 2'-O-methyluridine-3'-phosphate
  modified_base 9: mod_base = OTHER; note = adenosine-3'-phosphate
  modified_base 10: mod_base = OTHER; note = guanosine-3'-phosphate
  modified_base 11: mod_base = OTHER; note = guanosine-3'-phosphate
  modified_base 12: mod_base = OTHER; note = adenosine-3'-phosphate
  modified_base 13: mod_base = OTHER; note = adenosine-3'-phosphate
  modified_base 14: mod_base = OTHER; note = adenosine-3'-phosphate
  modified_base 15: mod_base = OTHER; note = 2'-O-methyluridine-3'-phosphate
  modified_base 16: mod_base = OTHER; note = adenosine-3'-phosphate
  modified_base 17: mod_base = OTHER; note = cytidine-3'-phosphate
  modified_base 18: mod_base = OTHER; note = 2'-O-methylcytidine-3'-phosphate
  modified_base 19: mod_base = OTHER; note = adenosine-3'-phosphate
  modified_base 20: mod_base = OTHER; note = 2'-deoxythymidine-3'-phosphorothioate
  misc_feature 1..19: note = RNA
  misc_feature 20..21: note = DNA
tgtaccctaggaaataccatt

SEQ ID NO: 419 - RNA, 23 nt, synthetic construct
  source 1..23: mol_type = other RNA
  modified_base 1: mod_base = OTHER; note = 2'-O-methyluridine-3'-phosphorothioate
  modified_base 2: mod_base = OTHER; note = 2'-deoxy-2'-fluoroguanosine-3'-phosphorothioate
  modified_base 3: mod_base = OTHER; note = 2'-O-methyluridine-3'-phosphate
  modified_base 4: mod_base = OTHER; note = 2'-deoxy-2'-fluoroadenosine-3'-phosphate
  modified_base 5: mod_base = OTHER; note = 2'-O-methylcytidine-3'-phosphate
  modified_base 6: mod_base = OTHER; note = 2'-deoxy-2'-fluorocytidine-3'-phosphate
  modified_base 7: mod_base = OTHER; note = 2'-O-methylcytidine-3'-phosphate
  modified_base 8: mod_base = OTHER; note = 2'-deoxy-2'-fluorouridine-3'-phosphate
  modified_base 9: mod_base = OTHER; note = 2'-O-methyladenosine-3'-phosphate
  modified_base 10: mod_base = OTHER; note = 2'-deoxy-2'-fluoroguanosine-3'-phosphate
  modified_base 11: mod_base = OTHER; note = 2'-O-methylguanosine-3'-phosphate
  modified_base 12: mod_base = OTHER; note = 2'-O-methyladenosine-3'-phosphate
  modified_base 13: mod_base = OTHER; note = 2'-O-methyladenosine-3'-phosphate
  modified_base 14: mod_base = OTHER; note = 2'-deoxy-2'-fluoroadenosine-3'-phosphate
  modified_base 15: mod_base = OTHER; note = 2'-O-methyluridine-3'-phosphate
  modified_base 16: mod_base = OTHER; note = 2'-deoxy-2'-fluoroadenosine-3'-phosphate
  modified_base 17: mod_base = OTHER; note = 2'-O-methylcytidine-3'-phosphate
  modified_base 18: mod_base = OTHER; note = 2'-deoxy-2'-fluorocytidine-3'-phosphate
  modified_base 19: mod_base = OTHER; note = 2'-O-methyladenosine-3'-phosphate
  modified_base 20: mod_base = OTHER; note = 2'-deoxy-2'-fluoroguanosine-3'-phosphate
  modified_base 21: mod_base = OTHER; note = 2'-O-methyladenosine-3'-phosphorothioate
  modified_base 22: mod_base = OTHER; note = 2'-O-methylguanosine-3'-phosphorothioate
  modified_base 23: mod_base = OTHER; note = 2'-O-methyluridine
tgtaccctaggaaataccagagt

SEQ ID NO: 420 - RNA, 23 nt, synthetic construct
  source 1..23: mol_type = other RNA
  modified_base 1: mod_base = OTHER; note = 2'-O-methyluridine-3'-phosphorothioate
  modified_base 2: mod_base = OTHER; note = 2'-deoxy-2'-fluorouridine-3'-phosphorothioate
  modified_base 3: mod_base = OTHER; note = 2'-O-methylguanosine-3'-phosphate
  modified_base 4: mod_base = OTHER; note = 2'-deoxy-2'-fluoroadenosine-3'-phosphate
  modified_base 5: mod_base = OTHER; note = 2'-O-methyladenosine-3'-phosphate
  modified_base 6: mod_base = OTHER; note = 2'-deoxy-2'-fluoroguanosine-3'-phosphate
  modified_base 7: mod_base = OTHER; note = 2'-O-methylguanosine-3'-phosphate
  modified_base 8: mod_base = OTHER; note = 2'-deoxy-2'-fluoroadenosine-3'-phosphate
  modified_base 9: mod_base = OTHER; note = 2'-O-methylcytidine-3'-phosphate
  modified_base 10: mod_base = OTHER; note = 2'-deoxy-2'-fluoroadenosine-3'-phosphate
  modified_base 11: mod_base = OTHER; note = 2'-O-methylcytidine-3'-phosphate
  modified_base 12: mod_base = OTHER; note = 2'-O-methylcytidine-3'-phosphate
  modified_base 13: mod_base = OTHER; note = 2'-O-methyluridine-3'-phosphate
  modified_base 14: mod_base = OTHER; note = 2'-deoxy-2'-fluorocytidine-3'-phosphate
  modified_base 15: mod_base = OTHER; note = 2'-O-methyluridine-3'-phosphate
  modified_base 16: mod_base = OTHER; note = 2'-deoxy-2'-fluorocytidine-3'-phosphate
  modified_base 17: mod_base = OTHER; note = 2'-O-methylcytidine-3'-phosphate
  modified_base 18: mod_base = OTHER; note = 2'-deoxy-2'-fluoroadenosine-3'-phosphate
  modified_base 19: mod_base = OTHER; note = 2'-O-methylguanosine-3'-phosphate
  modified_base 20: mod_base = OTHER; note = 2'-deoxy-2'-fluoroguanosine-3'-phosphate
  modified_base 21: mod_base = OTHER; note = 2'-O-methylcytidine-3'-phosphorothioate
  modified_base 22: mod_base = OTHER; note = 2'-O-methylcytidine-3'-phosphorothioate
  modified_base 23: mod_base = OTHER; note = 2'-O-methyladenosine
ttgaaggacacctctccaggcca

SEQ ID NO: 421 - RNA, 23 nt, synthetic construct
  source 1..23: mol_type = other RNA
  modified_base 1: mod_base = OTHER; note = 2'-O-methyluridine-3'-phosphorothioate
  modified_base 2: mod_base = OTHER; note = 2'-deoxy-2'-fluorouridine-3'-phosphorothioate
  modified_base 3: mod_base = OTHER; note = 2'-O-methylguanosine-3'-phosphate
  modified_base 4: mod_base = OTHER; note = 2'-deoxy-2'-fluorouridine-3'-phosphate
  modified_base 5: mod_base = OTHER; note = 2'-O-methyladenosine-3'-phosphate
  modified_base 6: mod_base = OTHER; note = 2'-deoxy-2'-fluorocytidine-3'-phosphate
  modified_base 7: mod_base = OTHER; note = 2'-O-methylcytidine-3'-phosphate
  modified_base 8: mod_base = OTHER; note = 2'-deoxy-2'-fluorocytidine-3'-phosphate
  modified_base 9: mod_base = OTHER; note = 2'-O-methyluridine-3'-phosphate
  modified_base 10: mod_base = OTHER; note = 2'-deoxy-2'-fluoroadenosine-3'-phosphate
  modified_base 11: mod_base = OTHER; note = 2'-O-methylguanosine-3'-phosphate
  modified_base 12: mod_base = OTHER; note = 2'-O-methylguanosine-3'-phosphate
  modified_base 13: mod_base = OTHER; note = 2'-O-methyladenosine-3'-phosphate
  modified_base 14: mod_base = OTHER; note = 2'-deoxy-2'-fluoroadenosine-3'-phosphate
  modified_base 15: mod_base = OTHER; note = 2'-O-methyladenosine-3'-phosphate
  modified_base 16: mod_base = OTHER; note = 2'-deoxy-2'-fluorouridine-3'-phosphate
  modified_base 17: mod_base = OTHER; note = 2'-O-methyladenosine-3'-phosphate
  modified_base 18: mod_base = OTHER; note = 2'-deoxy-2'-fluorocytidine-3'-phosphate
  modified_base 19: mod_base = OTHER; note = 2'-O-methylcytidine-3'-phosphate
  modified_base 20: mod_base = OTHER; note = 2'-deoxy-2'-fluoroadenosine-3'-phosphate
  modified_base 21: mod_base = OTHER; note = 2'-O-methylguanosine-3'-phosphorothioate
  modified_base 22: mod_base = OTHER; note = 2'-O-methyladenosine-3'-phosphorothioate
  modified_base 23: mod_base = OTHER; note = 2'-O-methylguanosine
ttgtaccctaggaaataccagag

SEQ ID NO: 422 - RNA, 23 nt, synthetic construct
  source 1..23: mol_type = other RNA
  modified_base 1: mod_base = OTHER; note = 2'-O-methyladenosine-3'-phosphorothioate
  modified_base 2: mod_base = OTHER; note = 2'-deoxy-2'-fluoroguanosine-3'-phosphorothioate
  modified_base 3: mod_base = OTHER; note = 2'-O-methyladenosine-3'-phosphate
  modified_base 4: mod_base = OTHER; note = 2'-deoxy-2'-fluorocytidine-3'-phosphate
  modified_base 5: mod_base = OTHER; note = 2'-O-methyladenosine-3'-phosphate
  modified_base 6: mod_base = OTHER; note = 2'-deoxy-2'-fluoroadenosine-3'-phosphate
  modified_base 7: mod_base = OTHER; note = 2'-O-methylguanosine-3'-phosphate
  modified_base 8: mod_base = OTHER; note = 2'-deoxy-2'-fluoroadenosine-3'-phosphate
  modified_base 9: mod_base = OTHER; note = 2'-O-methyluridine-3'-phosphate
  modified_base 10: mod_base = OTHER; note = 2'-deoxy-2'-fluoroguanosine-3'-phosphate
  modified_base 11: mod_base = OTHER; note = 2'-O-methylcytidine-3'-phosphate
  modified_base 12: mod_base = OTHER; note = 2'-O-methylcytidine-3'-phosphate
  modified_base 13: mod_base = OTHER; note = 2'-O-methyladenosine-3'-phosphate
  modified_base 14: mod_base = OTHER; note = 2'-deoxy-2'-fluorocytidine-3'-phosphate
  modified_base 15: mod_base = OTHER; note = 2'-O-methylcytidine-3'-phosphate
  modified_base 16: mod_base = OTHER; note = 2'-deoxy-2'-fluorouridine-3'-phosphate
  modified_base 17: mod_base = OTHER; note = 2'-O-methylcytidine-3'-phosphate
  modified_base 18: mod_base = OTHER; note = 2'-deoxy-2'-fluorocytidine-3'-phosphate
  modified_base 19: mod_base = OTHER; note = 2'-O-methyluridine-3'-phosphate
  modified_base 20: mod_base = OTHER; note = 2'-deoxy-2'-fluoroguanosine-3'-phosphate
  modified_base 21: mod_base = OTHER; note = 2'-O-methylcytidine-3'-phosphorothioate
  modified_base 22: mod_base = OTHER; note = 2'-O-methylcytidine-3'-phosphorothioate
  modified_base 23: mod_base = OTHER; note = 2'-O-methyladenosine
agacaagatgccacctcctgcca

SEQ ID NO: 423 - RNA, 23 nt, synthetic construct
  source 1..23: mol_type = other RNA
  modified_base 1: mod_base = OTHER; note = 2'-O-methyluridine-3'-phosphorothioate
  modified_base 2: mod_base = OTHER; note = 2'-deoxy-2'-fluorocytidine-3'-phosphorothioate
  modified_base 3: mod_base = OTHER; note = 2'-O-methylguanosine-3'-phosphate
  modified_base 4: mod_base = OTHER; note = 2'-deoxy-2'-fluorouridine-3'-phosphate
  modified_base 5: mod_base = OTHER; note = 2'-O-methyladenosine-3'-phosphate
  modified_base 6: mod_base = OTHER; note = 2'-deoxy-2'-fluoroguanosine-3'-phosphate
  modified_base 7: mod_base = OTHER; note = 2'-O-methyluridine-3'-phosphate
  modified_base 8: mod_base = OTHER; note = 2'-deoxy-2'-fluoroadenosine-3'-phosphate
  modified_base 9: mod_base = OTHER; note = 2'-O-methylguanosine-3'-phosphate
  modified_base 10: mod_base = OTHER; note = 2'-deoxy-2'-fluorocytidine-3'-phosphate
  modified_base 11: mod_base = OTHER; note = 2'-O-methyluridine-3'-phosphate
  modified_base 12: mod_base = OTHER; note = 2'-O-methylguanosine-3'-phosphate
  modified_base 13: mod_base = OTHER; note = 2'-O-methyluridine-3'-phosphate
  modified_base 14: mod_base = OTHER; note = 2'-deoxy-2'-fluoroguanosine-3'-phosphate
  modified_base 15: mod_base = OTHER; note = 2'-O-methylcytidine-3'-phosphate
  modified_base 16: mod_base = OTHER; note = 2'-deoxy-2'-fluoroadenosine-3'-phosphate
  modified_base 17: mod_base = OTHER; note = 2'-O-methylguanosine-3'-phosphate
  modified_base 18: mod_base = OTHER; note = 2'-deoxy-2'-fluoroguanosine-3'-phosphate
  modified_base 19: mod_base = OTHER; note = 2'-O-methylcytidine-3'-phosphate
  modified_base 20: mod_base = OTHER; note = 2'-deoxy-2'-fluorocytidine-3'-phosphate
  modified_base 21: mod_base = OTHER; note = 2'-O-methylcytidine-3'-phosphorothioate
  modified_base 22: mod_base = OTHER; note = 2'-O-methyluridine-3'-phosphorothioate
  modified_base 23: mod_base = OTHER; note = 2'-O-methyluridine
tcgtagtagctgtgcaggccctt

SEQ ID NO: 424 - RNA, 23 nt, synthetic construct
  source 1..23: mol_type = other RNA
  modified_base 1: mod_base = OTHER; note = 2'-O-methylguanosine-3'-phosphorothioate
  modified_base 2: mod_base = OTHER; note = 2'-deoxy-2'-fluorouridine-3'-phosphorothioate
  modified_base 3: mod_base = OTHER; note = 2'-O-methylguanosine-3'-phosphate
  modified_base 4: mod_base = OTHER; note = 2'-deoxy-2'-fluoroadenosine-3'-phosphate
  modified_base 5: mod_base = OTHER; note = 2'-O-methylguanosine-3'-phosphate
  modified_base 6: mod_base = OTHER; note = 2'-deoxy-2'-fluoroguanosine-3'-phosphate
  modified_base 7: mod_base = OTHER; note = 2'-O-methylguanosine-3'-phosphate
  modified_base 8: mod_base = OTHER; note = 2'-deoxy-2'-fluoroadenosine-3'-phosphate
  modified_base 9: mod_base = OTHER; note = 2'-O-methylguanosine-3'-phosphate
  modified_base 10: mod_base = OTHER; note = 2'-deoxy-2'-fluoroadenosine-3'-phosphate
  modified_base 11: mod_base = OTHER; note = 2'-O-methyluridine-3'-phosphate
  modified_base 12: mod_base = OTHER; note = 2'-O-methylcytidine-3'-phosphate
  modified_base 13: mod_base = OTHER; note = 2'-O-methyluridine-3'-phosphate
  modified_base 14: mod_base = OTHER; note = 2'-deoxy-2'-fluoroguanosine-3'-phosphate
  modified_base 15: mod_base = OTHER; note = 2'-O-methylguanosine-3'-phosphate
  modified_base 16: mod_base = OTHER; note = 2'-deoxy-2'-fluoroguanosine-3'-phosphate
  modified_base 17: mod_base = OTHER; note = 2'-O-methyladenosine-3'-phosphate
  modified_base 18: mod_base = OTHER; note = 2'-deoxy-2'-fluoroguanosine-3'-phosphate
  modified_base 19: mod_base = OTHER; note = 2'-O-methylguanosine-3'-phosphate
  modified_base 20: mod_base = OTHER; note = 2'-deoxy-2'-fluorouridine-3'-phosphate
  modified_base 21: mod_base = OTHER; note = 2'-O-methylguanosine-3'-phosphorothioate
  modified_base 22: mod_base = OTHER; note = 2'-O-methyladenosine-3'-phosphorothioate
  modified_base 23: mod_base = OTHER; note = 2'-O-methyladenosine
gtgagggagatctgggaggtgaa

SEQ ID NO: 425 - RNA, 23 nt, synthetic construct
  source 1..23: mol_type = other RNA
  modified_base 1: mod_base = OTHER; note = 2'-O-methyladenosine-3'-phosphorothioate
  modified_base 2: mod_base = OTHER; note = 2'-deoxy-2'-fluoroguanosine-3'-phosphorothioate
  modified_base 3: mod_base = OTHER; note = 2'-O-methylguanosine-3'-phosphate
  modified_base 4: mod_base = OTHER; note = 2'-deoxy-2'-fluoroadenosine-3'-phosphate
  modified_base 5: mod_base = OTHER; note = 2'-O-methyladenosine-3'-phosphate
  modified_base 6: mod_base = OTHER; note = 2'-deoxy-2'-fluoroadenosine-3'-phosphate
  modified_base 7: mod_base = OTHER; note = 2'-O-methyluridine-3'-phosphate
  modified_base 8: mod_base = OTHER; note = 2'-deoxy-2'-fluoroadenosine-3'-phosphate
  modified_base 9: mod_base = OTHER; note = 2'-O-methylcytidine-3'-phosphate
  modified_base 10: mod_base = OTHER; note = 2'-deoxy-2'-fluorocytidine-3'-phosphate
  modified_base 11: mod_base = OTHER; note = 2'-O-methyladenosine-3'-phosphate
  modified_base 12: mod_base = OTHER; note = 2'-O-methylguanosine-3'-phosphate
  modified_base 13: mod_base = OTHER; note = 2'-O-methyladenosine-3'-phosphate
  modified_base 14: mod_base = OTHER; note = 2'-deoxy-2'-fluoroguanosine-3'-phosphate
  modified_base 15: mod_base = OTHER; note = 2'-O-methyluridine-3'-phosphate
  modified_base 16: mod_base = OTHER; note = 2'-deoxy-2'-fluoroadenosine-3'-phosphate
  modified_base 17: mod_base = OTHER; note = 2'-O-methylguanosine-3'-phosphate
  modified_base 18: mod_base = OTHER; note = 2'-deoxy-2'-fluorocytidine-3'-phosphate
  modified_base 19: mod_base = OTHER; note = 2'-O-methyladenosine-3'-phosphate
  modified_base 20: mod_base = OTHER; note = 2'-deoxy-2'-fluorocytidine-3'-phosphate
  modified_base 21: mod_base = OTHER; note = 2'-O-methylcytidine-3'-phosphorothioate
  modified_base 22: mod_base = OTHER; note = 2'-O-methylcytidine-3'-phosphorothioate
  modified_base 23: mod_base = OTHER; note = 2'-O-methylcytidine
aggaaataccagagtagcacccc

SEQ ID NO: 426 - RNA, 23 nt, synthetic construct
  source 1..23: mol_type = other RNA
  modified_base 1: mod_base = OTHER; note = 2'-O-methyladenosine-3'-phosphorothioate
  modified_base 2: mod_base = OTHER; note = 2'-deoxy-2'-fluoroguanosine-3'-phosphorothioate
  modified_base 3: mod_base = OTHER; note = 2'-O-methyladenosine-3'-phosphate
  modified_base 4: mod_base = OTHER; note = 2'-deoxy-2'-fluorouridine-3'-phosphate
  modified_base 5: mod_base = OTHER; note = 2'-O-methylcytidine-3'-phosphate
  modified_base 6: mod_base = OTHER; note = 2'-deoxy-2'-fluorocytidine-3'-phosphate
  modified_base 7: mod_base = OTHER; note = 2'-O-methylcytidine-3'-phosphate
  modified_base 8: mod_base = OTHER; note = 2'-deoxy-2'-fluoroadenosine-3'-phosphate
  modified_base 9: mod_base = OTHER; note = 2'-O-methyladenosine-3'-phosphate
  modified_base 10: mod_base = OTHER; note = 2'-deoxy-2'-fluoroguanosine-3'-phosphate
  modified_base 11: mod_base = OTHER; note = 2'-O-methyluridine-3'-phosphate
  modified_base 12: mod_base = OTHER; note = 2'-O-methyluridine-3'-phosphate
  modified_base 13: mod_base = OTHER; note = 2'-O-methyladenosine-3'-phosphate
  modified_base 14: mod_base = OTHER; note = 2'-deoxy-2'-fluoroguanosine-3'-phosphate
  modified_base 15: mod_base = OTHER; note = 2'-O-methyladenosine-3'-phosphate
  modified_base 16: mod_base = OTHER; note = 2'-deoxy-2'-fluorocytidine-3'-phosphate
  modified_base 17: mod_base = OTHER; note = 2'-O-methylcytidine-3'-phosphate
  modified_base 18: mod_base = OTHER; note = 2'-deoxy-2'-fluoroadenosine-3'-phosphate
  modified_base 19: mod_base = OTHER; note = 2'-O-methylguanosine-3'-phosphate
  modified_base 20: mod_base = OTHER; note = 2'-deoxy-2'-fluoroguanosine-3'-phosphate
  modified_base 21: mod_base = OTHER; note = 2'-O-methylguanosine-3'-phosphorothioate
  modified_base 22: mod_base = OTHER; note = 2'-O-methylguanosine-3'-phosphorothioate
  modified_base 23: mod_base = OTHER; note = 2'-O-methylcytidine
agatcccaagttagaccaggggc

SEQ ID NO: 427 - RNA, 23 nt, synthetic construct
  source 1..23: mol_type = other RNA
  modified_base 1: mod_base = OTHER; note = 2'-O-methyluridine-3'-phosphorothioate
  modified_base 2: mod_base = OTHER; note = 2'-deoxy-2'-fluoroguanosine-3'-phosphorothioate
  modified_base 3: mod_base = OTHER; note = 2'-O-methyluridine-3'-phosphate
  modified_base 4: mod_base = OTHER; note = 2'-deoxy-2'-fluorouridine-3'-phosphate
  modified_base 5: mod_base = OTHER; note = 2'-O-methyladenosine-3'-phosphate
  modified_base 6: mod_base = OTHER; note = 2'-deoxy-2'-fluorouridine-3'-phosphate
  modified_base 7: mod_base = OTHER; note = 2'-O-methylcytidine-3'-phosphate
  modified_base 8: mod_base = OTHER; note = 2'-deoxy-2'-fluoroadenosine-3'-phosphate
  modified_base 9: mod_base = OTHER; note = 2'-O-methylcytidine-3'-phosphate
  modified_base 10: mod_base = OTHER; note = 2'-deoxy-2'-fluorocytidine-3'-phosphate
  modified_base 11: mod_base = OTHER; note = 2'-O-methylcytidine-3'-phosphate
  modified_base 12: mod_base = OTHER; note = 2'-O-methyladenosine-3'-phosphate
  modified_base 13: mod_base = OTHER; note = 2'-O-methylguanosine-3'-phosphate
  modified_base 14: mod_base = OTHER; note = 2'-deoxy-2'-fluorocytidine-3'-phosphate
  modified_base 15: mod_base = OTHER; note = 2'-O-methylguanosine-3'-phosphate
  modified_base 16: mod_base = OTHER; note = 2'-deoxy-2'-fluoroguanosine-3'-phosphate
  modified_base 17: mod_base = OTHER; note = 2'-O-methyluridine-3'-phosphate
  modified_base 18: mod_base = OTHER; note = 2'-deoxy-2'-fluorocytidine-3'-phosphate
  modified_base 19: mod_base = OTHER; note = 2'-O-methyladenosine-3'-phosphate
  modified_base 20: mod_base = OTHER; note = 2'-deoxy-2'-fluoroguanosine-3'-phosphate
  modified_base 21: mod_base = OTHER; note = 2'-O-methylcytidine-3'-phosphorothioate
  modified_base 22: mod_base = OTHER; note = 2'-O-methylguanosine-3'-phosphorothioate
  modified_base 23: mod_base = OTHER; note = 2'-O-methyladenosine
tgttatcacccagcggtcagcga

SEQ ID NO: 428 - RNA, 23 nt, synthetic construct
  source 1..23: mol_type = other RNA
  modified_base 1: mod_base = OTHER; note = 2'-O-methyladenosine-3'-phosphorothioate
  modified_base 2: mod_base = OTHER; note = 2'-deoxy-2'-fluorocytidine-3'-phosphorothioate
  modified_base 3: mod_base = OTHER; note = 2'-O-methyluridine-3'-phosphate
  modified_base 4: mod_base = OTHER; note = 2'-deoxy-2'-fluorouridine-3'-phosphate
  modified_base 5: mod_base = OTHER; note = 2'-O-methylcytidine-3'-phosphate
  modified_base 6: mod_base = OTHER; note = 2'-deoxy-2'-fluoroguanosine-3'-phosphate
  modified_base 7: mod_base = OTHER; note = 2'-O-methyluridine-3'-phosphate
  modified_base 8: mod_base = OTHER; note = 2'-deoxy-2'-fluoroadenosine-3'-phosphate
  modified_base 9: mod_base = OTHER; note = 2'-O-methylcytidine-3'-phosphate
  modified_base 10: mod_base = OTHER; note = 2'-deoxy-2'-fluorouridine-3'-phosphate
  modified_base 11: mod_base = OTHER; note = 2'-O-methylcytidine-3'-phosphate
  modified_base 12: mod_base = OTHER; note = 2'-O-methylguanosine-3'-phosphate
  modified_base 13: mod_base = OTHER; note = 2'-O-methylguanosine-3'-phosphate
  modified_base 14: mod_base = OTHER; note = 2'-deoxy-2'-fluorocytidine-3'-phosphate
  modified_base 15: mod_base = OTHER; note = 2'-O-methylcytidine-3'-phosphate
  modified_base 16: mod_base = OTHER; note = 2'-deoxy-2'-fluorocytidine-3'-phosphate
  modified_base 17: mod_base = OTHER; note = 2'-O-methyluridine-3'-phosphate
  modified_base 18: mod_base = OTHER; note = 2'-deoxy-2'-fluoroguanosine-3'-phosphate
  modified_base 19: mod_base = OTHER; note = 2'-O-methyluridine-3'-phosphate
  modified_base 20: mod_base = OTHER; note = 2'-deoxy-2'-fluoroadenosine-3'-phosphate
  modified_base 21: mod_base = OTHER; note = 2'-O-methylguanosine-3'-phosphorothioate
  modified_base 22: mod_base = OTHER; note = 2'-O-methylguanosine-3'-phosphorothioate
  modified_base 23: mod_base = OTHER; note = 2'-O-methylguanosine
acttcgtactcggccctgtaggg

SEQ ID NO: 429 - RNA, 23 nt, synthetic construct
  source 1..23: mol_type = other RNA
  modified_base 1: mod_base = OTHER; note = 2'-O-methylcytidine-3'-phosphorothioate
  modified_base 2: mod_base = OTHER; note = 2'-deoxy-2'-fluoroadenosine-3'-phosphorothioate
  modified_base 3: mod_base = OTHER; note = 2'-O-methyluridine-3'-phosphate
  modified_base 4: mod_base = OTHER; note = 2'-deoxy-2'-fluorouridine-3'-phosphate
  modified_base 5: mod_base = OTHER; note = 2'-O-methylcytidine-3'-phosphate
  modified_base 6: mod_base = OTHER; note = 2'-deoxy-2'-fluorocytidine-3'-phosphate
  modified_base 7: mod_base = OTHER; note = 2'-O-methylcytidine-3'-phosphate
  modified_base 8: mod_base = OTHER; note = 2'-deoxy-2'-fluoroadenosine-3'-phosphate
  modified_base 9: mod_base = OTHER; note = 2'-O-methylguanosine-3'-phosphate
  modified_base 10: mod_base = OTHER; note = 2'-deoxy-2'-fluoroadenosine-3'-phosphate
  modified_base 11: mod_base = OTHER; note = 2'-O-methyluridine-3'-phosphate
  modified_base 12: mod_base = OTHER; note = 2'-O-methylcytidine-3'-phosphate
  modified_base 13: mod_base = OTHER; note = 2'-O-methylcytidine-3'-phosphate
  modified_base 14: mod_base = OTHER; note = 2'-deoxy-2'-fluorocytidine-3'-phosphate
  modified_base 15: mod_base = OTHER; note = 2'-O-methyladenosine-3'-phosphate
  modified_base 16: mod_base = OTHER; note = 2'-deoxy-2'-fluoroadenosine-3'-phosphate
  modified_base 17: mod_base = OTHER; note = 2'-O-methylguanosine-3'-phosphate
  modified_base 18: mod_base = OTHER; note = 2'-deoxy-2'-fluorouridine-3'-phosphate
  modified_base 19: mod_base = OTHER; note = 2'-O-methyluridine-3'-phosphate
  modified_base 20: mod_base = OTHER; note = 2'-deoxy-2'-fluoroadenosine-3'-phosphate
  modified_base 21: mod_base = OTHER; note = 2'-O-methylguanosine-3'-phosphorothioate
  modified_base 22: mod_base = OTHER; note = 2'-O-methyladenosine-3'-phosphorothioate
  modified_base 23: mod_base = OTHER; note = 2'-O-methylcytidine
cattcccagatcccaagttagac

SEQ ID NO: 430 - RNA, 23 nt, synthetic construct
  source 1..23: mol_type = other RNA
  modified_base 1: mod_base = OTHER; note = 2'-O-methylcytidine-3'-phosphorothioate
  modified_base 2: mod_base = OTHER; note = 2'-deoxy-2'-fluorocytidine-3'-phosphorothioate
  modified_base 3: mod_base = OTHER; note = 2'-O-methyladenosine-3'-phosphate
  modified_base 4: mod_base = OTHER; note = 2'-deoxy-2'-fluorouridine-3'-phosphate
  modified_base 5: mod_base = OTHER; note = 2'-O-methylguanosine-3'-phosphate
  modified_base 6: mod_base = OTHER; note = 2'-deoxy-2'-fluoroguanosine-3'-phosphate
  modified_base 7: mod_base = OTHER; note = 2'-O-methylcytidine-3'-phosphate
  modified_base 8: mod_base = OTHER; note = 2'-deoxy-2'-fluorocytidine-3'-phosphate
  modified_base 9: mod_base = OTHER; note = 2'-O-methyladenosine-3'-phosphate
  modified_base 10: mod_base = OTHER; note = 2'-deoxy-2'-fluorocytidine-3'-phosphate
  modified_base 11: mod_base = OTHER; note = 2'-O-methyluridine-3'-phosphate
  modified_base 12: mod_base = OTHER; note = 2'-O-methylcytidine-3'-phosphate
  modified_base 13: mod_base = OTHER; note = 2'-O-methyladenosine-3'-phosphate
  modified_base 14: mod_base = OTHER; note = 2'-deoxy-2'-fluorocytidine-3'-phosphate
  modified_base 15: mod_base = OTHER; note = 2'-O-methylcytidine-3'-phosphate
  modified_base 16: mod_base = OTHER; note = 2'-deoxy-2'-fluorocytidine-3'-phosphate
  modified_base 17: mod_base = OTHER; note = 2'-O-methyluridine-3'-phosphate
  modified_base 18: mod_base = OTHER; note = 2'-deoxy-2'-fluorocytidine-3'-phosphate
  modified_base 19: mod_base = OTHER; note = 2'-O-methylguanosine-3'-phosphate
  modified_base 20: mod_base = OTHER; note = 2'-deoxy-2'-fluoroguanosine-3'-phosphate
  modified_base 21: mod_base = OTHER; note = 2'-O-methyladenosine-3'-phosphorothioate
  modified_base 22: mod_base = OTHER; note = 2'-O-methylguanosine-3'-phosphorothioate
  modified_base 23: mod_base = OTHER; note = 2'-O-methylguanosine
ccatggccactcaccctcggagg

SEQ ID NO: 431 - RNA, 23 nt, synthetic construct
  source 1..23: mol_type = other RNA
  modified_base 1: mod_base = OTHER; note = 2'-O-methyladenosine-3'-phosphorothioate
  modified_base 2: mod_base = OTHER; note = 2'-deoxy-2'-fluoroguanosine-3'-phosphorothioate
  modified_base 3: mod_base = OTHER; note = 2'-O-methyluridine-3'-phosphate
  modified_base 4: mod_base = OTHER; note = 2'-deoxy-2'-fluorouridine-3'-phosphate
  modified_base 5: mod_base = OTHER; note = 2'-O-methyluridine-3'-phosphate
  modified_base 6: mod_base = OTHER; note = 2'-deoxy-2'-fluorocytidine-3'-phosphate
  modified_base 7: mod_base = OTHER; note = 2'-O-methyluridine-3'-phosphate
  modified_base 8: mod_base = OTHER; note = 2'-deoxy-2'-fluorocytidine-3'-phosphate
  modified_base 9: mod_base = OTHER; note = 2'-O-methyluridine-3'-phosphate
  modified_base 10: mod_base = OTHER; note = 2'-deoxy-2'-fluorocytidine-3'-phosphate
  modified_base 11: mod_base = OTHER; note = 2'-O-methyladenosine-3'-phosphate
  modified_base 12: mod_base = OTHER; note = 2'-O-methyluridine-3'-phosphate
  modified_base 13: mod_base = OTHER; note = 2'-O-methylcytidine-3'-phosphate
  modified_base 14: mod_base = OTHER; note = 2'-deoxy-2'-fluorocytidine-3'-phosphate
  modified_base 15: mod_base = OTHER; note = 2'-O-methyladenosine-3'-phosphate
  modified_base 16: mod_base = OTHER; note = 2'-deoxy-2'-fluoroguanosine-3'-phosphate
  modified_base 17: mod_base = OTHER; note = 2'-O-methylguanosine-3'-phosphate
  modified_base 18: mod_base = OTHER; note = 2'-deoxy-2'-fluorocytidine-3'-phosphate
  modified_base 19: mod_base = OTHER; note = 2'-O-methylcytidine-3'-phosphate
  modified_base 20: mod_base = OTHER; note = 2'-deoxy-2'-fluoroguanosine-3'-phosphate
  modified_base 21: mod_base = OTHER; note = 2'-O-methyluridine-3'-phosphorothioate
  modified_base 22: mod_base = OTHER; note = 2'-O-methyluridine-3'-phosphorothioate
  modified_base 23: mod_base = OTHER; note = 2'-O-methylguanosine
agtttctctcatccaggccgttg

SEQ ID NO: 432 - RNA, 23 nt, synthetic construct
  source 1..23: mol_type = other RNA
  modified_base 1: mod_base = OTHER; note = 2'-O-methyladenosine-3'-phosphorothioate
  modified_base 2: mod_base = OTHER; note = 2'-deoxy-2'-fluorocytidine-3'-phosphorothioate
  modified_base 3: mod_base = OTHER; note = 2'-O-methylguanosine-3'-phosphate
  modified_base 4: mod_base = OTHER; note = 2'-deoxy-2'-fluoroguanosine-3'-phosphate
  modified_base 5: mod_base = OTHER; note = 2'-O-methylcytidine-3'-phosphate
  modified_base 6: mod_base = OTHER; note = 2'-deoxy-2'-fluoroadenosine-3'-phosphate
  modified_base 7: mod_base = OTHER; note = 2'-O-methyladenosine-3'-phosphate
  modified_base 8: mod_base = OTHER; note = 2'-deoxy-2'-fluoroadenosine-3'-phosphate
  modified_base 9: mod_base = OTHER; note = 2'-O-methyluridine-3'-phosphate
  modified_base 10: mod_base = OTHER; note = 2'-deoxy-2'-fluorocytidine-3'-phosphate
  modified_base 11: mod_base = OTHER; note = 2'-O-methyladenosine-3'-phosphate
  modified_base 12: mod_base = OTHER; note = 2'-O-methyluridine-3'-phosphate
  modified_base 13: mod_base = OTHER; note = 2'-O-methyladenosine-3'-phosphate
  modified_base 14: mod_base = OTHER; note = 2'-deoxy-2'-fluorocytidine-3'-phosphate
  modified_base 15: mod_base = OTHER; note = 2'-O-methyluridine-3'-phosphate
  modified_base 16: mod_base = OTHER; note = 2'-deoxy-2'-fluorouridine-3'-phosphate
  modified_base 17: mod_base = OTHER; note = 2'-O-methylcytidine-3'-phosphate
  modified_base 18: mod_base = OTHER; note = 2'-deoxy-2'-fluorouridine-3'-phosphate
  modified_base 19: mod_base = OTHER; note = 2'-O-methylguanosine-3'-phosphate
  modified_base 20: mod_base = OTHER; note = 2'-deoxy-2'-fluorocytidine-3'-phosphate
  modified_base 21: mod_base = OTHER; note = 2'-O-methylcytidine-3'-phosphorothioate
  modified_base 22: mod_base = OTHER; note = 2'-O-methyluridine-3'-phosphorothioate
  modified_base 23: mod_base = OTHER; note = 2'-O-methylcytidine
acggcaaatcatacttctgcctc

SEQ ID NO: 433 - RNA, 23 nt, synthetic construct
  source 1..23: mol_type = other RNA
  modified_base 1: mod_base = OTHER; note = 2'-O-methyluridine-3'-phosphorothioate
  modified_base 2: mod_base = OTHER; note = 2'-deoxy-2'-fluorocytidine-3'-phosphorothioate
  modified_base 3: mod_base = OTHER; note = 2'-O-methyluridine-3'-phosphate
  modified_base 4: mod_base = OTHER; note = 2'-deoxy-2'-fluorocytidine-3'-phosphate
  modified_base 5: mod_base = OTHER; note = 2'-O-methyluridine-3'-phosphate
  modified_base 6: mod_base = OTHER; note = 2'-deoxy-2'-fluorocytidine-3'-phosphate
  modified_base 7: mod_base = OTHER; note = 2'-O-methyladenosine-3'-phosphate
  modified_base 8: mod_base = OTHER; note = 2'-deoxy-2'-fluorouridine-3'-phosphate
  modified_base 9: mod_base = OTHER; note = 2'-O-methylcytidine-3'-phosphate
  modified_base 10: mod_base = OTHER; note = 2'-deoxy-2'-fluorocytidine-3'-phosphate
  modified_base 11: mod_base = OTHER; note = 2'-O-methyladenosine-3'-phosphate
  modified_base 12: mod_base = OTHER; note = 2'-O-methylguanosine-3'-phosphate
  modified_base 13: mod_base = OTHER; note = 2'-O-methylguanosine-3'-phosphate
  modified_base 14: mod_base = OTHER; note = 2'-deoxy-2'-fluorocytidine-3'-phosphate
  modified_base 15: mod_base = OTHER; note = 2'-O-methylcytidine-3'-phosphate
  modified_base 16: mod_base = OTHER; note = 2'-deoxy-2'-fluoroguanosine-3'-phosphate
  modified_base 17: mod_base = OTHER; note = 2'-O-methyluridine-3'-phosphate
  modified_base 18: mod_base = OTHER; note = 2'-deoxy-2'-fluorouridine-3'-phosphate
  modified_base 19: mod_base = OTHER; note = 2'-O-methylguanosine-3'-phosphate
  modified_base 20: mod_base = OTHER; note = 2'-deoxy-2'-fluoroguanosine-3'-phosphate
  modified_base 21: mod_base = OTHER; note = 2'-O-methylguanosine-3'-phosphorothioate
  modified_base 22: mod_base = OTHER; note = 2'-O-methylguanosine-3'-phosphorothioate
  modified_base 23: mod_base = OTHER; note = 2'-O-methylcytidine
tctctcatccaggccgttggggc

SEQ ID NO: 434 - RNA, 23 nt, synthetic construct
  source 1..23: mol_type = other RNA
  modified_base 1: mod_base = OTHER; note = 2'-O-methyladenosine-3'-phosphorothioate
  modified_base 2: mod_base = OTHER; note = 2'-deoxy-2'-fluoroguanosine-3'-phosphorothioate
  modified_base 3: mod_base = OTHER; note = 2'-O-methyladenosine-3'-phosphate
  modified_base 4: mod_base = OTHER; note = 2'-deoxy-2'-fluoroadenosine-3'-phosphate
  modified_base 5: mod_base = OTHER; note = 2'-O-methyluridine-3'-phosphate
  modified_base 6: mod_base = OTHER; note = 2'-deoxy-2'-fluoroguanosine-3'-phosphate
  modified_base 7: mod_base = OTHER; note = 2'-O-methyladenosine-3'-phosphate
  modified_base 8: mod_base = OTHER; note = 2'-deoxy-2'-fluoroadenosine-3'-phosphate
  modified_base 9: mod_base = OTHER; note = 2'-O-methylcytidine-3'-phosphate
  modified_base 10: mod_base = OTHER; note = 2'-deoxy-2'-fluorocytidine-3'-phosphate
  modified_base 11: mod_base = OTHER; note = 2'-O-methyladenosine-3'-phosphate
  modified_base 12: mod_base = OTHER; note = 2'-O-methylguanosine-3'-phosphate
  modified_base 13: mod_base = OTHER; note = 2'-O-methyladenosine-3'-phosphate
  modified_base 14: mod_base = OTHER; note = 2'-deoxy-2'-fluoroadenosine-3'-phosphate
  modified_base 15: mod_base = OTHER; note = 2'-O-methylguanosine-3'-phosphate
  modified_base 16: mod_base = OTHER; note = 2'-deoxy-2'-fluoroadenosine-3'-phosphate
  modified_base 17: mod_base = OTHER; note = 2'-O-methyladenosine-3'-phosphate
  modified_base 18: mod_base = OTHER; note = 2'-deoxy-2'-fluoroguanosine-3'-phosphate
  modified_base 19: mod_base = OTHER; note = 2'-O-methylcytidine-3'-phosphate
  modified_base 20: mod_base = OTHER; note = 2'-deoxy-2'-fluoroadenosine-3'-phosphate
  modified_base 21: mod_base = OTHER; note = 2'-O-methylguanosine-3'-phosphorothioate
  modified_base 22: mod_base = OTHER; note = 2'-O-methylguanosine-3'-phosphorothioate
  modified_base 23: mod_base = OTHER; note = 2'-O-methyluridine
agaatgaaccagaagaagcaggt

SEQ ID NO: 435 - RNA, 23 nt, synthetic construct
  source 1..23: mol_type = other RNA
  modified_base 1: mod_base = OTHER; note = 2'-O-methyluridine-3'-phosphorothioate
  modified_base 2: mod_base = OTHER; note = 2'-deoxy-2'-fluorouridine-3'-phosphorothioate
  modified_base 3: mod_base = OTHER; note = 2'-O-methyladenosine-3'-phosphate
  modified_base 4: mod_base = OTHER; note = 2'-deoxy-2'-fluoroguanosine-3'-phosphate
  modified_base 5: mod_base = OTHER; note = 2'-O-methyladenosine-3'-phosphate
  modified_base 6: mod_base = OTHER; note = 2'-deoxy-2'-fluorocytidine-3'-phosphate
  modified_base 7: mod_base = OTHER; note = 2'-O-methylcytidine-3'-phosphate
  modified_base 8: mod_base = OTHER; note = 2'-deoxy-2'-fluoroadenosine-3'-phosphate
  modified_base 9: mod_base = OTHER; note = 2'-O-methylguanosine-3'-phosphate
  modified_base 10: mod_base = OTHER; note = 2'-deoxy-2'-fluoroguanosine-3'-phosphate
  modified_base 11: mod_base = OTHER; note = 2'-O-methylguanosine-3'-phosphate
  modified_base 12: mod_base = OTHER; note = 2'-O-methylguanosine-3'-phosphate
  modified_base 13: mod_base = OTHER; note = 2'-O-methylcytidine-3'-phosphate
  modified_base 14: mod_base = OTHER; note = 2'-deoxy-2'-fluorouridine-3'-phosphate
  modified_base 15: mod_base = OTHER; note = 2'-O-methyluridine-3'-phosphate
  modified_base 16: mod_base = OTHER; note = 2'-deoxy-2'-fluorocytidine-3'-phosphate
  modified_base 17: mod_base = OTHER; note = 2'-O-methylcytidine-3'-phosphate
  modified_base 18: mod_base = OTHER; note = 2'-deoxy-2'-fluoroguanosine-3'-phosphate
  modified_base 19: mod_base = OTHER; note = 2'-O-methyladenosine-3'-phosphate
  modified_base 20: mod_base = OTHER; note = 2'-deoxy-2'-fluoroadenosine-3'-phosphate
  modified_base 21: mod_base = OTHER; note = 2'-O-methylguanosine-3'-phosphorothioate
  modified_base 22: mod_base = OTHER; note = 2'-O-methylcytidine-3'-phosphorothioate
  modified_base 23: mod_base = OTHER; note = 2'-O-methyluridine
ttagaccaggggcttccgaagct

SEQ ID NO: 436 - RNA, 23 nt, synthetic construct
  source 1..23: mol_type = other RNA
  modified_base 1: mod_base = OTHER; note = 2'-O-methylguanosine-3'-phosphorothioate
  modified_base 2: mod_base = OTHER; note = 2'-deoxy-2'-fluorocytidine-3'-phosphorothioate
  modified_base 3: mod_base = OTHER; note = 2'-O-methylcytidine-3'-phosphate
  modified_base 4: mod_base = OTHER; note = 2'-deoxy-2'-fluoroadenosine-3'-phosphate
  modified_base 5: mod_base = OTHER; note = 2'-O-methylcytidine-3'-phosphate
  modified_base 6: mod_base = OTHER; note = 2'-deoxy-2'-fluoroadenosine-3'-phosphate
  modified_base 7: mod_base = OTHER; note = 2'-O-methylcytidine-3'-phosphate
  modified_base 8: mod_base = OTHER; note = 2'-deoxy-2'-fluoroadenosine-3'-phosphate
  modified_base 9: mod_base = OTHER; note = 2'-O-methylguanosine-3'-phosphate
  modified_base 10: mod_base = OTHER; note = 2'-deoxy-2'-fluorocytidine-3'-phosphate
  modified_base 11: mod_base = OTHER; note = 2'-O-methylcytidine-3'-phosphate
  modified_base 12: mod_base = OTHER; note = 2'-O-methyluridine-3'-phosphate
  modified_base 13: mod_base = OTHER; note = 2'-O-methylcytidine-3'-phosphate
  modified_base 14: mod_base = OTHER; note = 2'-deoxy-2'-fluorocytidine-3'-phosphate
  modified_base 15: mod_base = OTHER; note = 2'-O-methyluridine-3'-phosphate
  modified_base 16: mod_base = OTHER; note = 2'-deoxy-2'-fluoroguanosine-3'-phosphate
  modified_base 17: mod_base = OTHER; note = 2'-O-methyluridine-3'-phosphate
  modified_base 18: mod_base = OTHER; note = 2'-deoxy-2'-fluorouridine-3'-phosphate
  modified_base 19: mod_base = OTHER; note = 2'-O-methylcytidine-3'-phosphate
  modified_base 20: mod_base = OTHER; note = 2'-deoxy-2'-fluorouridine-3'-phosphate
  modified_base 21: mod_base = OTHER; note = 2'-O-methylguanosine-3'-phosphorothioate
  modified_base 22: mod_base = OTHER; note = 2'-O-methylguanosine-3'-phosphorothioate
  modified_base 23: mod_base = OTHER; note = 2'-O-methyladenosine
gccacacagcctcctgttctgga

SEQ ID NO: 437 - RNA, 23 nt, synthetic construct
  source 1..23: mol_type = other RNA
  modified_base 1: mod_base = OTHER; note = 2'-O-methyladenosine-3'-phosphorothioate
  modified_base 2: mod_base = OTHER; note = 2'-deoxy-2'-fluoroadenosine-3'-phosphorothioate
  modified_base 3: mod_base = OTHER; note = 2'-O-methylguanosine-3'-phosphate
  modified_base 4: mod_base = OTHER; note = 2'-deoxy-2'-fluoroadenosine-3'-phosphate
  modified_base 5: mod_base = OTHER; note = 2'-O-methyluridine-3'-phosphate
  modified_base 6: mod_base = OTHER; note = 2'-deoxy-2'-fluorocytidine-3'-phosphate
  modified_base 7: mod_base = OTHER; note = 2'-O-methylcytidine-3'-phosphate
  modified_base 8: mod_base = OTHER; note = 2'-deoxy-2'-fluorouridine-3'-phosphate
  modified_base 9: mod_base = OTHER; note = 2'-O-methylguanosine-3'-phosphate
  modified_base 10: mod_base = OTHER; note = 2'-deoxy-2'-fluoroguanosine-3'-phosphate
  modified_base 11: mod_base = OTHER; note = 2'-O-methylguanosine-3'-phosphate
  modified_base 12: mod_base = OTHER; note = 2'-O-methyladenosine-3'-phosphate
  modified_base 13: mod_base = OTHER; note = 2'-O-methylguanosine-3'-phosphate
  modified_base 14: mod_base = OTHER; note = 2'-deoxy-2'-fluoroadenosine-3'-phosphate
  modified_base 15: mod_base = OTHER; note = 2'-O-methyladenosine-3'-phosphate
  modified_base 16: mod_base = OTHER; note = 2'-deoxy-2'-fluoroguanosine-3'-phosphate
  modified_base 17: mod_base = OTHER; note = 2'-O-methyluridine-3'-phosphate
  modified_base 18: mod_base = OTHER; note = 2'-deoxy-2'-fluoroguanosine-3'-phosphate
  modified_base 19: mod_base = OTHER; note = 2'-O-methylguanosine-3'-phosphate
  modified_base 20: mod_base = OTHER; note = 2'-deoxy-2'-fluorocytidine-3'-phosphate
  modified_base 21: mod_base = OTHER; note = 2'-O-methylguanosine-3'-phosphorothioate
  modified_base 22: mod_base = OTHER; note = 2'-O-methyladenosine-3'-phosphorothioate
  modified_base 23: mod_base = OTHER; note = 2'-O-methyluridine
aagatcctgggagaagtggcgat

SEQ ID NO: 438 - RNA, 23 nt, synthetic construct
  source 1..23: mol_type = other RNA
  modified_base 1: mod_base = OTHER; note = 2'-O-methyladenosine-3'-phosphorothioate
  modified_base 2: mod_base = OTHER; note = 2'-deoxy-2'-fluoroguanosine-3'-phosphorothioate
  modified_base 3: mod_base = OTHER; note = 2'-O-methylcytidine-3'-phosphate
  modified_base 4: mod_base = OTHER; note = 2'-deoxy-2'-fluorouridine-3'-phosphate
  modified_base 5: mod_base = OTHER; note = 2'-O-methyladenosine-3'-phosphate
  modified_base 6: mod_base = OTHER; note = 2'-deoxy-2'-fluorouridine-3'-phosphate
  modified_base 7: mod_base = OTHER; note = 2'-O-methylguanosine-3'-phosphate
  modified_base 8: mod_base = OTHER; note = 2'-deoxy-2'-fluorouridine-3'-phosphate
  modified_base 9: mod_base = OTHER; note = 2'-O-methylcytidine-3'-phosphate
  modified_base 10: mod_base = OTHER; note = 2'-deoxy-2'-fluorouridine-3'-phosphate
  modified_base 11: mod_base = OTHER; note = 2'-O-methyluridine-3'-phosphate
  modified_base 12: mod_base = OTHER; note = 2'-O-methyluridine-3'-phosphate
  modified_base 13: mod_base = OTHER; note = 2'-O-methylcytidine-3'-phosphate
  modified_base 14: mod_base = OTHER; note = 2'-deoxy-2'-fluoroadenosine-3'-phosphate
  modified_base 15: mod_base = OTHER; note = 2'-O-methylcytidine-3'-phosphate
  modified_base 16: mod_base = OTHER; note = 2'-deoxy-2'-fluoroadenosine-3'-phosphate
  modified_base 17: mod_base = OTHER; note = 2'-O-methylcytidine-3'-phosphate
  modified_base 18: mod_base = OTHER; note = 2'-deoxy-2'-fluorouridine-3'-phosphate
  modified_base 19: mod_base = OTHER; note = 2'-O-methylguanosine-3'-phosphate
  modified_base 20: mod_base = OTHER; note = 2'-deoxy-2'-fluoroguanosine-3'-phosphate
  modified_base 21: mod_base = OTHER; note = 2'-O-methylcytidine-3'-phosphorothioate
  modified_base 22: mod_base = OTHER; note = 2'-O-methyluridine-3'-phosphorothioate
  modified_base 23: mod_base = OTHER; note = 2'-O-methyluridine
agctatgtctttcacactggctt

SEQ ID NO: 439 - RNA, 23 nt, synthetic construct
  source 1..23: mol_type = other RNA
  modified_base 1: mod_base = OTHER; note = 2'-O-methylguanosine-3'-phosphorothioate
  modified_base 2: mod_base = OTHER; note = 2'-deoxy-2'-fluoroadenosine-3'-phosphorothioate
  modified_base 3: mod_base = OTHER; note = 2'-O-methyladenosine-3'-phosphate
  modified_base 4: mod_base = OTHER; note = 2'-deoxy-2'-fluorouridine-3'-phosphate
  modified_base 5: mod_base = OTHER; note = 2'-O-methyladenosine-3'-phosphate
  modified_base 6: mod_base = OTHER; note = 2'-deoxy-2'-fluorocytidine-3'-phosphate
  modified_base 7: mod_base = OTHER; note = 2'-O-methyluridine-3'-phosphate
  modified_base 8: mod_base = OTHER; note = 2'-deoxy-2'-fluorouridine-3'-phosphate
  modified_base 9: mod_base = OTHER; note = 2'-O-methylguanosine-3'-phosphate
  modified_base 10: mod_base = OTHER; note = 2'-deoxy-2'-fluorouridine-3'-phosphate
  modified_base 11: mod_base = OTHER; note = 2'-O-methylcytidine-3'-phosphate
  modified_base 12: mod_base = OTHER; note = 2'-O-methylcytidine-3'-phosphate
  modified_base 13: mod_base = OTHER; note = 2'-O-methylcytidine-3'-phosphate
  modified_base 14: mod_base = OTHER; note = 2'-deoxy-2'-fluorocytidine-3'-phosphate
  modified_base 15: mod_base = OTHER; note = 2'-O-methylcytidine-3'-phosphate
  modified_base 16: mod_base = OTHER; note = 2'-deoxy-2'-fluorouridine-3'-phosphate
  modified_base 17: mod_base = OTHER; note = 2'-O-methylguanosine-3'-phosphate
  modified_base 18: mod_base = OTHER; note = 2'-deoxy-2'-fluorocytidine-3'-phosphate
  modified_base 19: mod_base = OTHER; note = 2'-O-methyluridine-3'-phosphate
  modified_base 20: mod_base = OTHER; note = 2'-deoxy-2'-fluorouridine-3'-phosphate
  modified_base 21: mod_base = OTHER; note = 2'-O-methylguanosine-3'-phosphorothioate
  modified_base 22: mod_base = OTHER; note = 2'-O-methylguanosine-3'-phosphorothioate
  modified_base 23: mod_base = OTHER; note = 2'-O-methylcytidine
gaatacttgtccccctgcttggc

SEQ ID NO: 440 - RNA, 23 nt, synthetic construct
  source 1..23: mol_type = other RNA
  modified_base 1: mod_base = OTHER; note = 2'-O-methyladenosine-3'-phosphorothioate
  modified_base 2: mod_base = OTHER; note = 2'-deoxy-2'-fluoroguanosine-3'-phosphorothioate
  modified_base 3: mod_base = OTHER; note = 2'-O-methyluridine-3'-phosphate
  modified_base 4: mod_base = OTHER; note = 2'-deoxy-2'-fluorocytidine-3'-phosphate
  modified_base 5: mod_base = OTHER; note = 2'-O-methylcytidine-3'-phosphate
  modified_base 6: mod_base = OTHER; note = 2'-deoxy-2'-fluorouridine-3'-phosphate
  modified_base 7: mod_base = OTHER; note = 2'-O-methyluridine-3'-phosphate
  modified_base 8: mod_base = OTHER; note = 2'-deoxy-2'-fluoroguanosine-3'-phosphate
  modified_base 9: mod_base = OTHER; note = 2'-O-methyladenosine-3'-phosphate
  modified_base 10: mod_base = OTHER; note = 2'-deoxy-2'-fluorocytidine-3'-phosphate
  modified_base 11: mod_base = OTHER; note = 2'-O-methylcytidine-3'-phosphate
  modified_base 12: mod_base = OTHER; note = 2'-O-methylcytidine-3'-phosphate
  modified_base 13: mod_base = OTHER; note = 2'-O-methylcytidine-3'-phosphate
  modified_base 14: mod_base = OTHER; note = 2'-deoxy-2'-fluoroadenosine-3'-phosphate
  modified_base 15: mod_base = OTHER; note = 2'-O-methyluridine-3'-phosphate
  modified_base 16: mod_base = OTHER; note = 2'-deoxy-2'-fluorocytidine-3'-phosphate
  modified_base 17: mod_base = OTHER; note = 2'-O-methyladenosine-3'-phosphate
  modified_base 18: mod_base = OTHER; note = 2'-deoxy-2'-fluorocytidine-3'-phosphate
  modified_base 19: mod_base = OTHER; note = 2'-O-methyladenosine-3'-phosphate
  modified_base 20: mod_base = OTHER; note = 2'-deoxy-2'-fluoroguanosine-3'-phosphate
  modified_base 21: mod_base = OTHER; note = 2'-O-methylguanosine-3'-phosphorothioate
  modified_base 22: mod_base = OTHER; note = 2'-O-methylcytidine-3'-phosphorothioate
  modified_base 23: mod_base = OTHER; note = 2'-O-methyladenosine
agtccttgaccccatcacaggca

SEQ ID NO: 441 - RNA, 23 nt, synthetic construct
  source 1..23: mol_type = other RNA
  modified_base 1: mod_base = OTHER; note = 2'-O-methyluridine-3'-phosphorothioate
  modified_base 2: mod_base = OTHER; note = 2'-deoxy-2'-fluoroguanosine-3'-phosphorothioate
  modified_base 3: mod_base = OTHER; note = 2'-O-methylcytidine-3'-phosphate
  modified_base 4: mod_base = OTHER; note = 2'-deoxy-2'-fluoroadenosine-3'-phosphate
  modified_base 5: mod_base = OTHER; note = 2'-O-methylguanosine-3'-phosphate
  modified_base 6: mod_base = OTHER; note = 2'-deoxy-2'-fluorocytidine-3'-phosphate
  modified_base 7: mod_base = OTHER; note = 2'-O-methyluridine-3'-phosphate
  modified_base 8: mod_base = OTHER; note = 2'-deoxy-2'-fluoroadenosine-3'-phosphate
  modified_base 9: mod_base = OTHER; note = 2'-O-methyluridine-3'-phosphate
  modified_base 10: mod_base = OTHER; note = 2'-deoxy-2'-fluoroguanosine-3'-phosphate
  modified_base 11: mod_base = OTHER; note = 2'-O-methyluridine-3'-phosphate
  modified_base 12: mod_base = OTHER; note = 2'-O-methylcytidine-3'-phosphate
  modified_base 13: mod_base = OTHER; note = 2'-O-methyluridine-3'-phosphate
  modified_base 14: mod_base = OTHER; note = 2'-deoxy-2'-fluorouridine-3'-phosphate
  modified_base 15: mod_base = OTHER; note = 2'-O-methyluridine-3'-phosphate
  modified_base 16: mod_base = OTHER; note = 2'-deoxy-2'-fluorocytidine-3'-phosphate
  modified_base 17: mod_base = OTHER; note = 2'-O-methyladenosine-3'-phosphate
  modified_base 18: mod_base = OTHER; note = 2'-deoxy-2'-fluorocytidine-3'-phosphate
  modified_base 19: mod_base = OTHER; note = 2'-O-methyladenosine-3'-phosphate
  modified_base 20: mod_base = OTHER; note = 2'-deoxy-2'-fluorocytidine-3'-phosphate
  modified_base 21: mod_base = OTHER; note = 2'-O-methyluridine-3'-phosphorothioate
  modified_base 22: mod_base = OTHER; note = 2'-O-methylguanosine-3'-phosphorothioate
  modified_base 23: mod_base = OTHER; note = 2'-O-methylguanosine
tgcagctatgtctttcacactgg

SEQ ID NO: 442 - RNA, 23 nt, synthetic construct
  source 1..23: mol_type = other RNA
  modified_base 1: mod_base = OTHER; note = 2'-O-methylguanosine-3'-phosphorothioate
  modified_base 2: mod_base = OTHER; note = 2'-deoxy-2'-fluoroguanosine-3'-phosphorothioate
  modified_base 3: mod_base = OTHER; note = 2'-O-methylcytidine-3'-phosphate
  modified_base 4: mod_base = OTHER; note = 2'-deoxy-2'-fluorocytidine-3'-phosphate
  modified_base 5: mod_base = OTHER; note = 2'-O-methyladenosine-3'-phosphate
  modified_base 6: mod_base = OTHER; note = 2'-deoxy-2'-fluorocytidine-3'-phosphate
  modified_base 7: mod_base = OTHER; note = 2'-O-methyluridine-3'-phosphate
  modified_base 8: mod_base = OTHER; note = 2'-deoxy-2'-fluorocytidine-3'-phosphate
  modified_base 9: mod_base = OTHER; note = 2'-O-methyladenosine-3'-phosphate
  modified_base 10: mod_base = OTHER; note = 2'-deoxy-2'-fluorocytidine-3'-phosphate
  modified_base 11: mod_base = OTHER; note = 2'-O-methylcytidine-3'-phosphate
  modified_base 12: mod_base = OTHER; note = 2'-O-methylcytidine-3'-phosphate
  modified_base 13: mod_base = OTHER; note = 2'-O-methyluridine-3'-phosphate
  modified_base 14: mod_base = OTHER; note = 2'-deoxy-2'-fluorocytidine-3'-phosphate
  modified_base 15: mod_base = OTHER; note = 2'-O-methylguanosine-3'-phosphate
  modified_base 16: mod_base = OTHER; note = 2'-deoxy-2'-fluoroguanosine-3'-phosphate
  modified_base 17: mod_base = OTHER; note = 2'-O-methyladenosine-3'-phosphate
  modified_base 18: mod_base = OTHER; note = 2'-deoxy-2'-fluoroguanosine-3'-phosphate
  modified_base 19: mod_base = OTHER; note = 2'-O-methylguanosine-3'-phosphate
  modified_base 20: mod_base = OTHER; note = 2'-deoxy-2'-fluoroadenosine-3'-phosphate
  modified_base 21: mod_base = OTHER; note = 2'-O-methylcytidine-3'-phosphorothioate
  modified_base 22: mod_base = OTHER; note = 2'-O-methyladenosine-3'-phosphorothioate
  modified_base 23: mod_base = OTHER; note = 2'-O-methylcytidine
ggccactcaccctcggaggacac

SEQ ID NO: 443 - RNA, 23 nt, synthetic construct
  source 1..23: mol_type = other RNA
  modified_base 1: mod_base = OTHER; note = 2'-O-methyladenosine-3'-phosphorothioate
  modified_base 2: mod_base = OTHER; note = 2'-deoxy-2'-fluorocytidine-3'-phosphorothioate
  modified_base 3: mod_base = OTHER; note = 2'-O-methyladenosine-3'-phosphate
  modified_base 4: mod_base = OTHER; note = 2'-deoxy-2'-fluoroadenosine-3'-phosphate
  modified_base 5: mod_base = OTHER; note = 2'-O-methylguanosine-3'-phosphate
  modified_base 6: mod_base = OTHER; note = 2'-deoxy-2'-fluoroadenosine-3'-phosphate
  modified_base 7: mod_base = OTHER; note = 2'-O-methyluridine-3'-phosphate
  modified_base 8: mod_base = OTHER; note = 2'-deoxy-2'-fluoroguanosine-3'-phosphate
  modified_base 9: mod_base = OTHER; note = 2'-O-methylcytidine-3'-phosphate
  modified_base 10: mod_base = OTHER; note = 2'-deoxy-2'-fluorocytidine-3'-phosphate
  modified_base 11: mod_base = OTHER; note = 2'-O-methyladenosine-3'-phosphate
  modified_base 12: mod_base = OTHER; note = 2'-O-methylcytidine-3'-phosphate
  modified_base 13: mod_base = OTHER; note = 2'-O-methylcytidine-3'-phosphate
  modified_base 14: mod_base = OTHER; note = 2'-deoxy-2'-fluorouridine-3'-phosphate
  modified_base 15: mod_base = OTHER; note = 2'-O-methylcytidine-3'-phosphate
  modified_base 16: mod_base = OTHER; note = 2'-deoxy-2'-fluorocytidine-3'-phosphate
  modified_base 17: mod_base = OTHER; note = 2'-O-methyluridine-3'-phosphate
  modified_base 18: mod_base = OTHER; note = 2'-deoxy-2'-fluoroguanosine-3'-phosphate
  modified_base 19: mod_base = OTHER; note = 2'-O-methylcytidine-3'-phosphate
  modified_base 20: mod_base = OTHER; note = 2'-deoxy-2'-fluorocytidine-3'-phosphate
  modified_base 21: mod_base = OTHER; note = 2'-O-methyladenosine-3'-phosphorothioate
  modified_base 22: mod_base = OTHER; note = 2'-O-methylcytidine-3'-phosphorothioate
  modified_base 23: mod_base = OTHER; note = 2'-O-methylcytidine
acaagatgccacctcctgccacc

SEQ ID NO: 444 - RNA, 23 nt, synthetic construct
  source 1..23: mol_type = other RNA
  modified_base 1: mod_base = OTHER; note = 2'-O-methyladenosine-3'-phosphorothioate
  modified_base 2: mod_base = OTHER; note = 2'-deoxy-2'-fluorouridine-3'-phosphorothioate
  modified_base 3: mod_base = OTHER; note = 2'-O-methyladenosine-3'-phosphate
  modified_base 4: mod_base = OTHER; note = 2'-deoxy-2'-fluorocytidine-3'-phosphate
  modified_base 5: mod_base = OTHER; note = 2'-O-methyladenosine-3'-phosphate
  modified_base 6: mod_base = OTHER; note = 2'-deoxy-2'-fluorouridine-3'-phosphate
  modified_base 7: mod_base = OTHER; note = 2'-O-methylguanosine-3'-phosphate
  modified_base 8: mod_base = OTHER; note = 2'-deoxy-2'-fluoroguanosine-3'-phosphate
  modified_base 9: mod_base = OTHER; note = 2'-O-methylcytidine-3'-phosphate
  modified_base 10: mod_base = OTHER; note = 2'-deoxy-2'-fluorocytidine-3'-phosphate
  modified_base 11: mod_base = OTHER; note = 2'-O-methyladenosine-3'-phosphate
  modified_base 12: mod_base = OTHER; note = 2'-O-methylguanosine-3'-phosphate
  modified_base 13: mod_base = OTHER; note = 2'-O-methyluridine-3'-phosphate
  modified_base 14: mod_base = OTHER; note = 2'-deoxy-2'-fluorocytidine-3'-phosphate
  modified_base 15: mod_base = OTHER; note = 2'-O-methylguanosine-3'-phosphate
  modified_base 16: mod_base = OTHER; note = 2'-deoxy-2'-fluoroguanosine-3'-phosphate
  modified_base 17: mod_base = OTHER; note = 2'-O-methyluridine-3'-phosphate
  modified_base 18: mod_base = OTHER; note = 2'-deoxy-2'-fluorocytidine-3'-phosphate
  modified_base 19: mod_base = OTHER; note = 2'-O-methylcytidine-3'-phosphate
  modified_base 20: mod_base = OTHER; note = 2'-deoxy-2'-fluorocytidine-3'-phosphate
  modified_base 21: mod_base = OTHER; note = 2'-O-methylguanosine-3'-phosphorothioate
  modified_base 22: mod_base = OTHER; note = 2'-O-methylguanosine-3'-phosphorothioate
  modified_base 23: mod_base = OTHER; note = 2'-O-methylcytidine
atacatggccagtcggtcccggc

SEQ ID NO: 445 - RNA, 23 nt, synthetic construct
  source 1..23: mol_type = other RNA
  modified_base 1: mod_base = OTHER; note = 2'-O-methyluridine-3'-phosphorothioate
  modified_base 2: mod_base = OTHER; note = 2'-deoxy-2'-fluorouridine-3'-phosphorothioate
  modified_base 3: mod_base = OTHER; note = 2'-O-methylcytidine-3'-phosphate
  modified_base 4: mod_base = OTHER; note = 2'-deoxy-2'-fluoroguanosine-3'-phosphate
  modified_base 5: mod_base = OTHER; note = 2'-O-methyluridine-3'-phosphate
  modified_base 6: mod_base = OTHER; note = 2'-deoxy-2'-fluoroadenosine-3'-phosphate
  modified_base 7: mod_base = OTHER; note = 2'-O-methylcytidine-3'-phosphate
  modified_base 8: mod_base = OTHER; note = 2'-deoxy-2'-fluorouridine-3'-phosphate
  modified_base 9: mod_base = OTHER; note = 2'-O-methylcytidine-3'-phosphate
  modified_base 10: mod_base = OTHER; note = 2'-deoxy-2'-fluoroguanosine-3'-phosphate
  modified_base 11: mod_base = OTHER; note = 2'-O-methylguanosine-3'-phosphate
  modified_base 12: mod_base = OTHER; note = 2'-O-methylcytidine-3'-phosphate
  modified_base 13: mod_base = OTHER; note = 2'-O-methylcytidine-3'-phosphate
  modified_base 14: mod_base = OTHER; note = 2'-deoxy-2'-fluorocytidine-3'-phosphate
  modified_base 15: mod_base = OTHER; note = 2'-O-methyluridine-3'-phosphate
  modified_base 16: mod_base = OTHER; note = 2'-deoxy-2'-fluoroguanosine-3'-phosphate
  modified_base 17: mod_base = OTHER; note = 2'-O-methyluridine-3'-phosphate
  modified_base 18: mod_base = OTHER; note = 2'-deoxy-2'-fluoroadenosine-3'-phosphate
  modified_base 19: mod_base = OTHER; note = 2'-O-methylguanosine-3'-phosphate
  modified_base 20: mod_base = OTHER; note = 2'-deoxy-2'-fluoroguanosine-3'-phosphate
  modified_base 21: mod_base = OTHER; note = 2'-O-methylguanosine-3'-phosphorothioate
  modified_base 22: mod_base = OTHER; note = 2'-O-methylguanosine-3'-phosphorothioate
  modified_base 23: mod_base = OTHER; note = 2'-O-methyladenosine
ttcgtactcggccctgtagggga

SEQ ID NO: 446 - RNA, 23 nt, synthetic construct
  source 1..23: mol_type = other RNA
  modified_base 1: mod_base = OTHER; note = 2'-O-methyluridine-3'-phosphorothioate
  modified_base 2: mod_base = OTHER; note = 2'-deoxy-2'-fluoroadenosine-3'-phosphorothioate
  modified_base 3: mod_base = OTHER; note = 2'-O-methylguanosine-3'-phosphate
  modified_base 4: mod_base = OTHER; note = 2'-deoxy-2'-fluoroadenosine-3'-phosphate
  modified_base 5: mod_base = OTHER; note = 2'-O-methylcytidine-3'-phosphate
  modified_base 6: mod_base = OTHER; note = 2'-deoxy-2'-fluorocytidine-3'-phosphate
  modified_base 7: mod_base = OTHER; note = 2'-O-methyladenosine-3'-phosphate
  modified_base 8: mod_base = OTHER; note = 2'-deoxy-2'-fluoroguanosine-3'-phosphate
  modified_base 9: mod_base = OTHER; note = 2'-O-methylguanosine-3'-phosphate
  modified_base 10: mod_base = OTHER; note = 2'-deoxy-2'-fluoroguanosine-3'-phosphate
  modified_base 11: mod_base = OTHER; note = 2'-O-methylguanosine-3'-phosphate
  modified_base 12: mod_base = OTHER; note = 2'-O-methylcytidine-3'-phosphate
  modified_base 13: mod_base = OTHER; note = 2'-O-methyluridine-3'-phosphate
  modified_base 14: mod_base = OTHER; note = 2'-deoxy-2'-fluorouridine-3'-phosphate
  modified_base 15: mod_base = OTHER; note = 2'-O-methylcytidine-3'-phosphate
  modified_base 16: mod_base = OTHER; note = 2'-deoxy-2'-fluorocytidine-3'-phosphate
  modified_base 17: mod_base = OTHER; note = 2'-O-methylguanosine-3'-phosphate
  modified_base 18: mod_base = OTHER; note = 2'-deoxy-2'-fluoroadenosine-3'-phosphate
  modified_base 19: mod_base = OTHER; note = 2'-O-methyladenosine-3'-phosphate
  modified_base 20: mod_base = OTHER; note = 2'-deoxy-2'-fluoroguanosine-3'-phosphate
  modified_base 21: mod_base = OTHER; note = 2'-O-methylcytidine-3'-phosphorothioate
  modified_base 22: mod_base = OTHER; note = 2'-O-methyluridine-3'-phosphorothioate
  modified_base 23: mod_base = OTHER; note = 2'-O-methylguanosine
tagaccaggggcttccgaagctg

SEQ ID NO: 447 - RNA, 23 nt, synthetic construct
  source 1..23: mol_type = other RNA
  modified_base 1: mod_base = OTHER; note = 2'-O-methyladenosine-3'-phosphorothioate
  modified_base 2: mod_base = OTHER; note = 2'-deoxy-2'-fluoroguanosine-3'-phosphorothioate
  modified_base 3: mod_base = OTHER; note = 2'-O-methyladenosine-3'-phosphate
  modified_base 4: mod_base = OTHER; note = 2'-deoxy-2'-fluorouridine-3'-phosphate
  modified_base 5: mod_base = OTHER; note = 2'-O-methylguanosine-3'-phosphate
  modified_base 6: mod_base = OTHER; note = 2'-deoxy-2'-fluorouridine-3'-phosphate
  modified_base 7: mod_base = OTHER; note = 2'-O-methylguanosine-3'-phosphate
  modified_base 8: mod_base = OTHER; note = 2'-deoxy-2'-fluorouridine-3'-phosphate
  modified_base 9: mod_base = OTHER; note = 2'-O-methylcytidine-3'-phosphate
  modified_base 10: mod_base = OTHER; note = 2'-deoxy-2'-fluoroguanosine-3'-phosphate
  modified_base 11: mod_base = OTHER; note = 2'-O-methyladenosine-3'-phosphate
  modified_base 12: mod_base = OTHER; note = 2'-O-methylcytidine-3'-phosphate
  modified_base 13: mod_base = OTHER; note = 2'-O-methylcytidine-3'-phosphate
  modified_base 14: mod_base = OTHER; note = 2'-deoxy-2'-fluorocytidine-3'-phosphate
  modified_base 15: mod_base = OTHER; note = 2'-O-methylcytidine-3'-phosphate
  modified_base 16: mod_base = OTHER; note = 2'-deoxy-2'-fluoroguanosine-3'-phosphate
  modified_base 17: mod_base = OTHER; note = 2'-O-methyladenosine-3'-phosphate
  modified_base 18: mod_base = OTHER; note = 2'-deoxy-2'-fluoroadenosine-3'-phosphate
  modified_base 19: mod_base = OTHER; note = 2'-O-methylcytidine-3'-phosphate
  modified_base 20: mod_base = OTHER; note = 2'-deoxy-2'-fluorocytidine-3'-phosphate
  modified_base 21: mod_base = OTHER; note = 2'-O-methyluridine-3'-phosphorothioate
  modified_base 22: mod_base = OTHER; note = 2'-O-methylguanosine-3'-phosphorothioate
  modified_base 23: mod_base = OTHER; note = 2'-O-methylguanosine
agatgtgtcgaccccgaacctgg

SEQ ID NO: 448 - RNA, 23 nt, synthetic construct
  source 1..23: mol_type = other RNA
  modified_base 1: mod_base = OTHER; note = 2'-O-methylcytidine-3'-phosphorothioate
  modified_base 2: mod_base = OTHER; note = 2'-deoxy-2'-fluorocytidine-3'-phosphorothioate
  modified_base 3: mod_base = OTHER; note = 2'-O-methylcytidine-3'-phosphate
  modified_base 4: mod_base = OTHER; note = 2'-deoxy-2'-fluoroadenosine-3'-phosphate
  modified_base 5: mod_base = OTHER; note = 2'-O-methylcytidine-3'-phosphate
  modified_base 6: mod_base = OTHER; note = 2'-deoxy-2'-fluoroadenosine-3'-phosphate
  modified_base 7: mod_base = OTHER; note = 2'-O-methylguanosine-3'-phosphate
  modified_base 8: mod_base = OTHER; note = 2'-deoxy-2'-fluoroadenosine-3'-phosphate
  modified_base 9: mod_base = OTHER; note = 2'-O-methyluridine-3'-phosphate
  modified_base 10: mod_base = OTHER; note = 2'-deoxy-2'-fluoroguanosine-3'-phosphate
  modified_base 11: mod_base = OTHER; note = 2'-O-methyluridine-3'-phosphate
  modified_base 12: mod_base = OTHER; note = 2'-O-methylguanosine-3'-phosphate
  modified_base 13: mod_base = OTHER; note = 2'-O-methyluridine-3'-phosphate
  modified_base 14: mod_base = OTHER; note = 2'-deoxy-2'-fluorocytidine-3'-phosphate
  modified_base 15: mod_base = OTHER; note = 2'-O-methylguanosine-3'-phosphate
  modified_base 16: mod_base = OTHER; note = 2'-deoxy-2'-fluoroadenosine-3'-phosphate
  modified_base 17: mod_base = OTHER; note = 2'-O-methylcytidine-3'-phosphate
  modified_base 18: mod_base = OTHER; note = 2'-deoxy-2'-fluorocytidine-3'-phosphate
  modified_base 19: mod_base = OTHER; note = 2'-O-methylcytidine-3'-phosphate
  modified_base 20: mod_base = OTHER; note = 2'-deoxy-2'-fluorocytidine-3'-phosphate
  modified_base 21: mod_base = OTHER; note = 2'-O-methylguanosine-3'-phosphorothioate
  modified_base 22: mod_base = OTHER; note = 2'-O-methyladenosine-3'-phosphorothioate
  modified_base 23: mod_base = OTHER; note = 2'-O-methyladenosine
cccacagatgtgtcgaccccgaa

SEQ ID NO: 449 - RNA, 23 nt, synthetic construct
  source 1..23: mol_type = other RNA
  modified_base 1: mod_base = OTHER; note = 2'-O-methyladenosine-3'-phosphorothioate
  modified_base 2: mod_base = OTHER; note = 2'-deoxy-2'-fluorocytidine-3'-phosphorothioate
  modified_base 3: mod_base = OTHER; note = 2'-O-methylguanosine-3'-phosphate
  modified_base 4: mod_base = OTHER; note = 2'-deoxy-2'-fluorouridine-3'-phosphate
  modified_base 5: mod_base = OTHER; note = 2'-O-methylcytidine-3'-phosphate
  modified_base 6: mod_base = OTHER; note = 2'-deoxy-2'-fluoroadenosine-3'-phosphate
  modified_base 7: mod_base = OTHER; note = 2'-O-methyluridine-3'-phosphate
  modified_base 8: mod_base = OTHER; note = 2'-deoxy-2'-fluoroadenosine-3'-phosphate
  modified_base 9: mod_base = OTHER; note = 2'-O-methylcytidine-3'-phosphate
  modified_base 10: mod_base = OTHER; note = 2'-deoxy-2'-fluoroadenosine-3'-phosphate
  modified_base 11: mod_base = OTHER; note = 2'-O-methyluridine-3'-phosphate
  modified_base 12: mod_base = OTHER; note = 2'-O-methylguanosine-3'-phosphate
  modified_base 13: mod_base = OTHER; note = 2'-O-methylguanosine-3'-phosphate
  modified_base 14: mod_base = OTHER; note = 2'-deoxy-2'-fluorocytidine-3'-phosphate
  modified_base 15: mod_base = OTHER; note = 2'-O-methylcytidine-3'-phosphate
  modified_base 16: mod_base = OTHER; note = 2'-deoxy-2'-fluoroadenosine-3'-phosphate
  modified_base 17: mod_base = OTHER; note = 2'-O-methylguanosine-3'-phosphate
  modified_base 18: mod_base = OTHER; note = 2'-deoxy-2'-fluorouridine-3'-phosphate
  modified_base 19: mod_base = OTHER; note = 2'-O-methylcytidine-3'-phosphate
  modified_base 20: mod_base = OTHER; note = 2'-deoxy-2'-fluoroguanosine-3'-phosphate
  modified_base 21: mod_base = OTHER; note = 2'-O-methylguanosine-3'-phosphorothioate
  modified_base 22: mod_base = OTHER; note = 2'-O-methyluridine-3'-phosphorothioate
  modified_base 23: mod_base = OTHER; note = 2'-O-methylcytidine
acgtcatacatggccagtcggtc

SEQ ID NO: 450 - RNA, 23 nt, synthetic construct
  source 1..23: mol_type = other RNA
  modified_base 1: mod_base = OTHER; note = 2'-O-methyladenosine-3'-phosphorothioate
  modified_base 2: mod_base = OTHER; note = 2'-deoxy-2'-fluorouridine-3'-phosphorothioate
  modified_base 3: mod_base = OTHER; note = 2'-O-methylguanosine-3'-phosphate
  modified_base 4: mod_base = OTHER; note = 2'-deoxy-2'-fluorouridine-3'-phosphate
  modified_base 5: mod_base = OTHER; note = 2'-O-methylguanosine-3'-phosphate
  modified_base 6: mod_base = OTHER; note = 2'-deoxy-2'-fluorouridine-3'-phosphate
  modified_base 7: mod_base = OTHER; note = 2'-O-methylcytidine-3'-phosphate
  modified_base 8: mod_base = OTHER; note = 2'-deoxy-2'-fluoroguanosine-3'-phosphate
  modified_base 9: mod_base = OTHER; note = 2'-O-methyladenosine-3'-phosphate
  modified_base 10: mod_base = OTHER; note = 2'-deoxy-2'-fluorocytidine-3'-phosphate
  modified_base 11: mod_base = OTHER; note = 2'-O-methylcytidine-3'-phosphate
  modified_base 12: mod_base = OTHER; note = 2'-O-methylcytidine-3'-phosphate
  modified_base 13: mod_base = OTHER; note = 2'-O-methylcytidine-3'-phosphate
  modified_base 14: mod_base = OTHER; note = 2'-deoxy-2'-fluoroguanosine-3'-phosphate
  modified_base 15: mod_base = OTHER; note = 2'-O-methyladenosine-3'-phosphate
  modified_base 16: mod_base = OTHER; note = 2'-deoxy-2'-fluoroadenosine-3'-phosphate
  modified_base 17: mod_base = OTHER; note = 2'-O-methylcytidine-3'-phosphate
  modified_base 18: mod_base = OTHER; note = 2'-deoxy-2'-fluorocytidine-3'-phosphate
  modified_base 19: mod_base = OTHER; note = 2'-O-methyluridine-3'-phosphate
  modified_base 20: mod_base = OTHER; note = 2'-deoxy-2'-fluoroguanosine-3'-phosphate
  modified_base 21: mod_base = OTHER; note = 2'-O-methylguanosine-3'-phosphorothioate
  modified_base 22: mod_base = OTHER; note = 2'-O-methyladenosine-3'-phosphorothioate
  modified_base 23: mod_base = OTHER; note = 2'-O-methylguanosine
atgtgtcgaccccgaacctggag

SEQ ID NO: 451 - RNA, 23 nt, synthetic construct
  source 1..23: mol_type = other RNA
  modified_base 1: mod_base = OTHER; note = 2'-O-methyluridine-3'-phosphorothioate
  modified_base 2: mod_base = OTHER; note = 2'-deoxy-2'-fluoroadenosine-3'-phosphorothioate
  modified_base 3: mod_base = OTHER; note = 2'-O-methylguanosine-3'-phosphate
  modified_base 4: mod_base = OTHER; note = 2'-deoxy-2'-fluorocytidine-3'-phosphate
  modified_base 5: mod_base = OTHER; note = 2'-O-methyluridine-3'-phosphate
  modified_base 6: mod_base = OTHER; note = 2'-deoxy-2'-fluoroguanosine-3'-phosphate
  modified_base 7: mod_base = OTHER; note = 2'-O-methyluridine-3'-phosphate
  modified_base 8: mod_base = OTHER; note = 2'-deoxy-2'-fluoroadenosine-3'-phosphate
  modified_base 9: mod_base = OTHER; note = 2'-O-methylguanosine-3'-phosphate
  modified_base 10: mod_base = OTHER; note = 2'-deoxy-2'-fluorocytidine-3'-phosphate
  modified_base 11: mod_base = OTHER; note = 2'-O-methylguanosine-3'-phosphate
  modified_base 12: mod_base = OTHER; note = 2'-O-methylguanosine-3'-phosphate
  modified_base 13: mod_base = OTHER; note = 2'-O-methyluridine-3'-phosphate
  modified_base 14: mod_base = OTHER; note = 2'-deoxy-2'-fluoroadenosine-3'-phosphate
  modified_base 15: mod_base = OTHER; note = 2'-O-methyladenosine-3'-phosphate
  modified_base 16: mod_base = OTHER; note = 2'-deoxy-2'-fluorocytidine-3'-phosphate
  modified_base 17: mod_base = OTHER; note = 2'-O-methyladenosine-3'-phosphate
  modified_base 18: mod_base = OTHER; note = 2'-deoxy-2'-fluoroadenosine-3'-phosphate
  modified_base 19: mod_base = OTHER; note = 2'-O-methylcytidine-3'-phosphate
  modified_base 20: mod_base = OTHER; note = 2'-deoxy-2'-fluorocytidine-3'-phosphate
  modified_base 21: mod_base = OTHER; note = 2'-O-methylcytidine-3'-phosphorothioate
  modified_base 22: mod_base = OTHER; note = 2'-O-methyladenosine-3'-phosphorothioate
  modified_base 23: mod_base = OTHER; note = 2'-O-methylguanosine
tagctgtagcggtaacaacccag

SEQ ID NO: 452 - RNA, 23 nt, synthetic construct
  source 1..23: mol_type = other RNA
  modified_base 1: mod_base = OTHER; note = 2'-O-methylcytidine-3'-phosphorothioate
  modified_base 2: mod_base = OTHER; note = 2'-deoxy-2'-fluoroadenosine-3'-phosphorothioate
  modified_base 3: mod_base = OTHER; note = 2'-O-methylguanosine-3'-phosphate
  modified_base 4: mod_base = OTHER; note = 2'-deoxy-2'-fluoroadenosine-3'-phosphate
  modified_base 5: mod_base = OTHER; note = 2'-O-methyluridine-3'-phosphate
  modified_base 6: mod_base = OTHER; note = 2'-deoxy-2'-fluorocytidine-3'-phosphate
  modified_base 7: mod_base = OTHER; note = 2'-O-methylcytidine-3'-phosphate
  modified_base 8: mod_base = OTHER; note = 2'-deoxy-2'-fluorocytidine-3'-phosphate
  modified_base 9: mod_base = OTHER; note = 2'-O-methyladenosine-3'-phosphate
  modified_base 10: mod_base = OTHER; note = 2'-deoxy-2'-fluoroadenosine-3'-phosphate
  modified_base 11: mod_base = OTHER; note = 2'-O-methylguanosine-3'-phosphate
  modified_base 12: mod_base = OTHER; note = 2'-O-methyluridine-3'-phosphate
  modified_base 13: mod_base = OTHER; note = 2'-O-methyluridine-3'-phosphate
  modified_base 14: mod_base = OTHER; note = 2'-deoxy-2'-fluoroadenosine-3'-phosphate
  modified_base 15: mod_base = OTHER; note = 2'-O-methylguanosine-3'-phosphate
  modified_base 16: mod_base = OTHER; note = 2'-deoxy-2'-fluoroadenosine-3'-phosphate
  modified_base 17: mod_base = OTHER; note = 2'-O-methylcytidine-3'-phosphate
  modified_base 18: mod_base = OTHER; note = 2'-deoxy-2'-fluorocytidine-3'-phosphate
  modified_base 19: mod_base = OTHER; note = 2'-O-methyladenosine-3'-phosphate
  modified_base 20: mod_base = OTHER; note = 2'-deoxy-2'-fluoroguanosine-3'-phosphate
  modified_base 21: mod_base = OTHER; note = 2'-O-methylguanosine-3'-phosphorothioate
  modified_base 22: mod_base = OTHER; note = 2'-O-methylguanosine-3'-phosphorothioate
  modified_base 23: mod_base = OTHER; note = 2'-O-methylguanosine
cagatcccaagttagaccagggg

SEQ ID NO: 453 - RNA, 23 nt, synthetic construct
  source 1..23: mol_type = other RNA
  modified_base 1: mod_base = OTHER; note = 2'-O-methyluridine-3'-phosphorothioate
  modified_base 2: mod_base = OTHER; note = 2'-deoxy-2'-fluoroadenosine-3'-phosphorothioate
  modified_base 3: mod_base = OTHER; note = 2'-O-methylguanosine-3'-phosphate
  modified_base 4: mod_base = OTHER; note = 2'-deoxy-2'-fluorocytidine-3'-phosphate
  modified_base 5: mod_base = OTHER; note = 2'-O-methylguanosine-3'-phosphate
  modified_base 6: mod_base = OTHER; note = 2'-deoxy-2'-fluoroguanosine-3'-phosphate
  modified_base 7: mod_base = OTHER; note = 2'-O-methyluridine-3'-phosphate
  modified_base 8: mod_base = OTHER; note = 2'-deoxy-2'-fluoroadenosine-3'-phosphate
  modified_base 9: mod_base = OTHER; note = 2'-O-methyladenosine-3'-phosphate
  modified_base 10: mod_base = OTHER; note = 2'-deoxy-2'-fluorocytidine-3'-phosphate
  modified_base 11: mod_base = OTHER; note = 2'-O-methyladenosine-3'-phosphate
  modified_base 12: mod_base = OTHER; note = 2'-O-methyladenosine-3'-phosphate
  modified_base 13: mod_base = OTHER; note = 2'-O-methylcytidine-3'-phosphate
  modified_base 14: mod_base = OTHER; note = 2'-deoxy-2'-fluorocytidine-3'-phosphate
  modified_base 15: mod_base = OTHER; note = 2'-O-methylcytidine-3'-phosphate
  modified_base 16: mod_base = OTHER; note = 2'-deoxy-2'-fluoroadenosine-3'-phosphate
  modified_base 17: mod_base = OTHER; note = 2'-O-methylguanosine-3'-phosphate
  modified_base 18: mod_base = OTHER; note = 2'-deoxy-2'-fluorocytidine-3'-phosphate
  modified_base 19: mod_base = OTHER; note = 2'-O-methylguanosine-3'-phosphate
  modified_base 20: mod_base = OTHER; note = 2'-deoxy-2'-fluorouridine-3'-phosphate
  modified_base 21: mod_base = OTHER; note = 2'-O-methylguanosine-3'-phosphorothioate
  modified_base 22: mod_base = OTHER; note = 2'-O-methylguanosine-3'-phosphorothioate
  modified_base 23: mod_base = OTHER; note = 2'-O-methyladenosine
tagcggtaacaacccagcgtgga

SEQ ID NO: 454 - RNA, 23 nt, synthetic construct
  source 1..23: mol_type = other RNA
  modified_base 1: mod_base = OTHER; note = 2'-O-methylcytidine-3'-phosphorothioate
  modified_base 2: mod_base = OTHER; note = 2'-deoxy-2'-fluorocytidine-3'-phosphorothioate
  modified_base 3: mod_base = OTHER; note = 2'-O-methylcytidine-3'-phosphate
  modified_base 4: mod_base = OTHER; note = 2'-deoxy-2'-fluorocytidine-3'-phosphate
  modified_base 5: mod_base = OTHER; note = 2'-O-methyladenosine-3'-phosphate
  modified_base 6: mod_base = OTHER; note = 2'-deoxy-2'-fluorocytidine-3'-phosphate
  modified_base 7: mod_base = OTHER; note = 2'-O-methyladenosine-3'-phosphate
  modified_base 8: mod_base = OTHER; note = 2'-deoxy-2'-fluoroguanosine-3'-phosphate
  modified_base 9: mod_base = OTHER; note = 2'-O-methyladenosine-3'-phosphate
  modified_base 10: mod_base = OTHER; note = 2'-deoxy-2'-fluorouridine-3'-phosphate
  modified_base 11: mod_base = OTHER; note = 2'-O-methylguanosine-3'-phosphate
  modified_base 12: mod_base = OTHER; note = 2'-O-methyluridine-3'-phosphate
  modified_base 13: mod_base = OTHER; note = 2'-O-methylguanosine-3'-phosphate
  modified_base 14: mod_base = OTHER; note = 2'-deoxy-2'-fluorouridine-3'-phosphate
  modified_base 15: mod_base = OTHER; note = 2'-O-methylcytidine-3'-phosphate
  modified_base 16: mod_base = OTHER; note = 2'-deoxy-2'-fluoroguanosine-3'-phosphate
  modified_base 17: mod_base = OTHER; note = 2'-O-methyladenosine-3'-phosphate
  modified_base 18: mod_base = OTHER; note = 2'-deoxy-2'-fluorocytidine-3'-phosphate
  modified_base 19: mod_base = OTHER; note = 2'-O-methylcytidine-3'-phosphate
  modified_base 20: mod_base = OTHER; note = 2'-deoxy-2'-fluorocytidine-3'-phosphate
  modified_base 21: mod_base = OTHER; note = 2'-O-methylcytidine-3'-phosphorothioate
  modified_base 22: mod_base = OTHER; note = 2'-O-methylguanosine-3'-phosphorothioate
  modified_base 23: mod_base = OTHER; note = 2'-O-methyladenosine
ccccacagatgtgtcgaccccga

SEQ ID NO: 455 - RNA, 23 nt, synthetic construct
  source 1..23: mol_type = other RNA
  modified_base 1: mod_base = OTHER; note = 2'-O-methyladenosine-3'-phosphorothioate
  modified_base 2: mod_base = OTHER; note = 2'-deoxy-2'-fluoroadenosine-3'-phosphorothioate
  modified_base 3: mod_base = OTHER; note = 2'-O-methylguanosine-3'-phosphate
  modified_base 4: mod_base = OTHER; note = 2'-deoxy-2'-fluorocytidine-3'-phosphate
  modified_base 5: mod_base = OTHER; note = 2'-O-methylcytidine-3'-phosphate
  modified_base 6: mod_base = OTHER; note = 2'-deoxy-2'-fluoroadenosine-3'-phosphate
  modified_base 7: mod_base = OTHER; note = 2'-O-methyluridine-3'-phosphate
  modified_base 8: mod_base = OTHER; note = 2'-deoxy-2'-fluoroadenosine-3'-phosphate
  modified_base 9: mod_base = OTHER; note = 2'-O-methylguanosine-3'-phosphate
  modified_base 10: mod_base = OTHER; note = 2'-deoxy-2'-fluorouridine-3'-phosphate
  modified_base 11: mod_base = OTHER; note = 2'-O-methylguanosine-3'-phosphate
  modified_base 12: mod_base = OTHER; note = 2'-O-methylcytidine-3'-phosphate
  modified_base 13: mod_base = OTHER; note = 2'-O-methyladenosine-3'-phosphate
  modified_base 14: mod_base = OTHER; note = 2'-deoxy-2'-fluorocytidine-3'-phosphate
  modified_base 15: mod_base = OTHER; note = 2'-O-methylcytidine-3'-phosphate
  modified_base 16: mod_base = OTHER; note = 2'-deoxy-2'-fluorocytidine-3'-phosphate
  modified_base 17: mod_base = OTHER; note = 2'-O-methylguanosine-3'-phosphate
  modified_base 18: mod_base = OTHER; note = 2'-deoxy-2'-fluorocytidine-3'-phosphate
  modified_base 19: mod_base = OTHER; note = 2'-O-methyladenosine-3'-phosphate
  modified_base 20: mod_base = OTHER; note = 2'-deoxy-2'-fluorocytidine-3'-phosphate
  modified_base 21: mod_base = OTHER; note = 2'-O-methyladenosine-3'-phosphorothioate
  modified_base 22: mod_base = OTHER; note = 2'-O-methylcytidine-3'-phosphorothioate
  modified_base 23: mod_base = OTHER; note = 2'-O-methylcytidine
aagccatagtgcacccgcacacc

SEQ ID NO: 456 - RNA, 23 nt, synthetic construct
  source 1..23: mol_type = other RNA
  modified_base 1: mod_base = OTHER; note = 2'-O-methylguanosine-3'-phosphorothioate
  modified_base 2: mod_base = OTHER; note = 2'-deoxy-2'-fluoroadenosine-3'-phosphorothioate
  modified_base 3: mod_base = OTHER; note = 2'-O-methyluridine-3'-phosphate
  modified_base 4: mod_base = OTHER; note = 2'-deoxy-2'-fluorocytidine-3'-phosphate
  modified_base 5: mod_base = OTHER; note = 2'-O-methylcytidine-3'-phosphate
  modified_base 6: mod_base = OTHER; note = 2'-deoxy-2'-fluorocytidine-3'-phosphate
  modified_base 7: mod_base = OTHER; note = 2'-O-methyladenosine-3'-phosphate
  modified_base 8: mod_base = OTHER; note = 2'-deoxy-2'-fluoroadenosine-3'-phosphate
  modified_base 9: mod_base = OTHER; note = 2'-O-methylguanosine-3'-phosphate
  modified_base 10: mod_base = OTHER; note = 2'-deoxy-2'-fluorouridine-3'-phosphate
  modified_base 11: mod_base = OTHER; note = 2'-O-methyluridine-3'-phosphate
  modified_base 12: mod_base = OTHER; note = 2'-O-methyladenosine-3'-phosphate
  modified_base 13: mod_base = OTHER; note = 2'-O-methylguanosine-3'-phosphate
  modified_base 14: mod_base = OTHER; note = 2'-deoxy-2'-fluoroadenosine-3'-phosphate
  modified_base 15: mod_base = OTHER; note = 2'-O-methylcytidine-3'-phosphate
  modified_base 16: mod_base = OTHER; note = 2'-deoxy-2'-fluorocytidine-3'-phosphate
  modified_base 17: mod_base = OTHER; note = 2'-O-methyladenosine-3'-phosphate
  modified_base 18: mod_base = OTHER; note = 2'-deoxy-2'-fluoroguanosine-3'-phosphate
  modified_base 19: mod_base = OTHER; note = 2'-O-methylguanosine-3'-phosphate
  modified_base 20: mod_base = OTHER; note = 2'-deoxy-2'-fluoroguanosine-3'-phosphate
  modified_base 21: mod_base = OTHER; note = 2'-O-methylguanosine-3'-phosphorothioate
  modified_base 22: mod_base = OTHER; note = 2'-O-methylcytidine-3'-phosphorothioate
  modified_base 23: mod_base = OTHER; note = 2'-O-methyluridine
gatcccaagttagaccaggggct

SEQ ID NO: 457 - RNA, 23 nt, synthetic construct
  source 1..23: mol_type = other RNA
  modified_base 1: mod_base = OTHER; note = 2'-O-methyluridine-3'-phosphorothioate
  modified_base 2: mod_base = OTHER; note = 2'-deoxy-2'-fluoroguanosine-3'-phosphorothioate
  modified_base 3: mod_base = OTHER; note = 2'-O-methyladenosine-3'-phosphate
  modified_base 4: mod_base = OTHER; note = 2'-deoxy-2'-fluoroadenosine-3'-phosphate
  modified_base 5: mod_base = OTHER; note = 2'-O-methylguanosine-3'-phosphate
  modified_base 6: mod_base = OTHER; note = 2'-deoxy-2'-fluoroguanosine-3'-phosphate
  modified_base 7: mod_base = OTHER; note = 2'-O-methyladenosine-3'-phosphate
  modified_base 8: mod_base = OTHER; note = 2'-deoxy-2'-fluorocytidine-3'-phosphate
  modified_base 9: mod_base = OTHER; note = 2'-O-methyladenosine-3'-phosphate
  modified_base 10: mod_base = OTHER; note = 2'-deoxy-2'-fluorocytidine-3'-phosphate
  modified_base 11: mod_base = OTHER; note = 2'-O-methylcytidine-3'-phosphate
  modified_base 12: mod_base = OTHER; note = 2'-O-methyluridine-3'-phosphate
  modified_base 13: mod_base = OTHER; note = 2'-O-methylcytidine-3'-phosphate
  modified_base 14: mod_base = OTHER; note = 2'-deoxy-2'-fluorouridine-3'-phosphate
  modified_base 15: mod_base = OTHER; note = 2'-O-methylcytidine-3'-phosphate
  modified_base 16: mod_base = OTHER; note = 2'-deoxy-2'-fluorocytidine-3'-phosphate
  modified_base 17: mod_base = OTHER; note = 2'-O-methyladenosine-3'-phosphate
  modified_base 18: mod_base = OTHER; note = 2'-deoxy-2'-fluoroguanosine-3'-phosphate
  modified_base 19: mod_base = OTHER; note = 2'-O-methylguanosine-3'-phosphate
  modified_base 20: mod_base = OTHER; note = 2'-deoxy-2'-fluorocytidine-3'-phosphate
  modified_base 21: mod_base = OTHER; note = 2'-O-methylcytidine-3'-phosphorothioate
  modified_base 22: mod_base = OTHER; note = 2'-O-methyladenosine-3'-phosphorothioate
  modified_base 23: mod_base = OTHER; note = 2'-O-methylguanosine
tgaaggacacctctccaggccag

SEQ ID NO: 458 - RNA, 23 nt, synthetic construct
  source 1..23: mol_type = other RNA
  modified_base 1: mod_base = OTHER; note = 2'-O-methyluridine-3'-phosphorothioate
  modified_base 2: mod_base = OTHER; note = 2'-deoxy-2'-fluoroguanosine-3'-phosphorothioate
  modified_base 3: mod_base = OTHER; note = 2'-O-methylguanosine-3'-phosphate
  modified_base 4: mod_base = OTHER; note = 2'-deoxy-2'-fluoroadenosine-3'-phosphate
  modified_base 5: mod_base = OTHER; note = 2'-O-methylguanosine-3'-phosphate
  modified_base 6: mod_base = OTHER; note = 2'-deoxy-2'-fluoroadenosine-3'-phosphate
  modified_base 7: mod_base = OTHER; note = 2'-O-methyladenosine-3'-phosphate
  modified_base 8: mod_base = OTHER; note = 2'-deoxy-2'-fluorouridine-3'-phosphate
  modified_base 9: mod_base = OTHER; note = 2'-O-methylguanosine-3'-phosphate
  modified_base 10: mod_base = OTHER; note = 2'-deoxy-2'-fluoroadenosine-3'-phosphate
  modified_base 11: mod_base = OTHER; note = 2'-O-methyladenosine-3'-phosphate
  modified_base 12: mod_base = OTHER; note = 2'-O-methylcytidine-3'-phosphate
  modified_base 13: mod_base = OTHER; note = 2'-O-methylcytidine-3'-phosphate
  modified_base 14: mod_base = OTHER; note = 2'-deoxy-2'-fluoroadenosine-3'-phosphate
  modified_base 15: mod_base = OTHER; note = 2'-O-methylguanosine-3'-phosphate
  modified_base 16: mod_base = OTHER; note = 2'-deoxy-2'-fluoroadenosine-3'-phosphate
  modified_base 17: mod_base = OTHER; note = 2'-O-methyladenosine-3'-phosphate
  modified_base 18: mod_base = OTHER; note = 2'-deoxy-2'-fluoroguanosine-3'-phosphate
  modified_base 19: mod_base = OTHER; note = 2'-O-methyladenosine-3'-phosphate
  modified_base 20: mod_base = OTHER; note = 2'-deoxy-2'-fluoroadenosine-3'-phosphate
  modified_base 21: mod_base = OTHER; note = 2'-O-methylguanosine-3'-phosphorothioate
  modified_base 22: mod_base = OTHER; note = 2'-O-methylcytidine-3'-phosphorothioate
  modified_base 23: mod_base = OTHER; note = 2'-O-methyladenosine
tggagaatgaaccagaagaagca

SEQ ID NO: 459 - RNA, 23 nt, synthetic construct
  source 1..23: mol_type = other RNA
  modified_base 1: mod_base = OTHER; note = 2'-O-methyladenosine-3'-phosphorothioate
  modified_base 2: mod_base = OTHER; note = 2'-deoxy-2'-fluoroadenosine-3'-phosphorothioate
  modified_base 3: mod_base = OTHER; note = 2'-O-methyluridine-3'-phosphate
  modified_base 4: mod_base = OTHER; note = 2'-deoxy-2'-fluoroadenosine-3'-phosphate
  modified_base 5: mod_base = OTHER; note = 2'-O-methylcytidine-3'-phosphate
  modified_base 6: mod_base = OTHER; note = 2'-deoxy-2'-fluorouridine-3'-phosphate
  modified_base 7: mod_base = OTHER; note = 2'-O-methyluridine-3'-phosphate
  modified_base 8: mod_base = OTHER; note = 2'-deoxy-2'-fluoroguanosine-3'-phosphate
  modified_base 9: mod_base = OTHER; note = 2'-O-methyluridine-3'-phosphate
  modified_base 10: mod_base = OTHER; note = 2'-deoxy-2'-fluorocytidine-3'-phosphate
  modified_base 11: mod_base = OTHER; note = 2'-O-methylcytidine-3'-phosphate
  modified_base 12: mod_base = OTHER; note = 2'-O-methylcytidine-3'-phosphate
  modified_base 13: mod_base = OTHER; note = 2'-O-methylcytidine-3'-phosphate
  modified_base 14: mod_base = OTHER; note = 2'-deoxy-2'-fluorocytidine-3'-phosphate
  modified_base 15: mod_base = OTHER; note = 2'-O-methyluridine-3'-phosphate
  modified_base 16: mod_base = OTHER; note = 2'-deoxy-2'-fluoroguanosine-3'-phosphate
  modified_base 17: mod_base = OTHER; note = 2'-O-methylcytidine-3'-phosphate
  modified_base 18: mod_base = OTHER; note = 2'-deoxy-2'-fluorouridine-3'-phosphate
  modified_base 19: mod_base = OTHER; note = 2'-O-methyluridine-3'-phosphate
  modified_base 20: mod_base = OTHER; note = 2'-deoxy-2'-fluoroguanosine-3'-phosphate
  modified_base 21: mod_base = OTHER; note = 2'-O-methylguanosine-3'-phosphorothioate
  modified_base 22: mod_base = OTHER; note = 2'-O-methylcytidine-3'-phosphorothioate
  modified_base 23: mod_base = OTHER; note = 2'-O-methyladenosine
aatacttgtccccctgcttggca

SEQ ID NO: 460 - RNA, 23 nt, synthetic construct
  source 1..23: mol_type = other RNA
  modified_base 1: mod_base = OTHER; note = 2'-O-methylguanosine-3'-phosphorothioate
  modified_base 2: mod_base = OTHER; note = 2'-deoxy-2'-fluorocytidine-3'-phosphorothioate
  modified_base 3: mod_base = OTHER; note = 2'-O-methylcytidine-3'-phosphate
  modified_base 4: mod_base = OTHER; note = 2'-deoxy-2'-fluoroadenosine-3'-phosphate
  modified_base 5: mod_base = OTHER; note = 2'-O-methyluridine-3'-phosphate
  modified_base 6: mod_base = OTHER; note = 2'-deoxy-2'-fluoroguanosine-3'-phosphate
  modified_base 7: mod_base = OTHER; note = 2'-O-methylcytidine-3'-phosphate
  modified_base 8: mod_base = OTHER; note = 2'-deoxy-2'-fluorouridine-3'-phosphate
  modified_base 9: mod_base = OTHER; note = 2'-O-methylguanosine-3'-phosphate
  modified_base 10: mod_base = OTHER; note = 2'-deoxy-2'-fluorouridine-3'-phosphate
  modified_base 11: mod_base = OTHER; note = 2'-O-methylcytidine-3'-phosphate
  modified_base 12: mod_base = OTHER; note = 2'-O-methylcytidine-3'-phosphate
  modified_base 13: mod_base = OTHER; note = 2'-O-methyluridine-3'-phosphate
  modified_base 14: mod_base = OTHER; note = 2'-deoxy-2'-fluorocytidine-3'-phosphate
  modified_base 15: mod_base = OTHER; note = 2'-O-methylcytidine-3'-phosphate
  modified_base 16: mod_base = OTHER; note = 2'-deoxy-2'-fluorouridine-3'-phosphate
  modified_base 17: mod_base = OTHER; note = 2'-O-methylguanosine-3'-phosphate
  modified_base 18: mod_base = OTHER; note = 2'-deoxy-2'-fluoroguanosine-3'-phosphate
  modified_base 19: mod_base = OTHER; note = 2'-O-methyladenosine-3'-phosphate
  modified_base 20: mod_base = OTHER; note = 2'-deoxy-2'-fluoroadenosine-3'-phosphate
  modified_base 21: mod_base = OTHER; note = 2'-O-methylguanosine-3'-phosphorothioate
  modified_base 22: mod_base = OTHER; note = 2'-O-methylcytidine-3'-phosphorothioate
  modified_base 23: mod_base = OTHER; note = 2'-O-methyladenosine
gccatgctgtcctcctggaagca

SEQ ID NO: 461 - RNA, 23 nt, synthetic construct
  source 1..23: mol_type = other RNA
  modified_base 1: mod_base = OTHER; note = 2'-O-methyladenosine-3'-phosphorothioate
  modified_base 2: mod_base = OTHER; note = 2'-deoxy-2'-fluorocytidine-3'-phosphorothioate
  modified_base 3: mod_base = OTHER; note = 2'-O-methylguanosine-3'-phosphate
  modified_base 4: mod_base = OTHER; note = 2'-deoxy-2'-fluorocytidine-3'-phosphate
  modified_base 5: mod_base = OTHER; note = 2'-O-methyladenosine-3'-phosphate
  modified_base 6: mod_base = OTHER; note = 2'-deoxy-2'-fluoroguanosine-3'-phosphate
  modified_base 7: mod_base = OTHER; note = 2'-O-methyluridine-3'-phosphate
  modified_base 8: mod_base = OTHER; note = 2'-deoxy-2'-fluorouridine-3'-phosphate
  modified_base 9: mod_base = OTHER; note = 2'-O-methyluridine-3'-phosphate
  modified_base 10: mod_base = OTHER; note = 2'-deoxy-2'-fluorocytidine-3'-phosphate
  modified_base 11: mod_base = OTHER; note = 2'-O-methyluridine-3'-phosphate
  modified_base 12: mod_base = OTHER; note = 2'-O-methylcytidine-3'-phosphate
  modified_base 13: mod_base = OTHER; note = 2'-O-methyluridine-3'-phosphate
  modified_base 14: mod_base = OTHER; note = 2'-deoxy-2'-fluorocytidine-3'-phosphate
  modified_base 15: mod_base = OTHER; note = 2'-O-methyladenosine-3'-phosphate
  modified_base 16: mod_base = OTHER; note = 2'-deoxy-2'-fluorouridine-3'-phosphate
  modified_base 17: mod_base = OTHER; note = 2'-O-methylcytidine-3'-phosphate
  modified_base 18: mod_base = OTHER; note = 2'-deoxy-2'-fluorocytidine-3'-phosphate
  modified_base 19: mod_base = OTHER; note = 2'-O-methyladenosine-3'-phosphate
  modified_base 20: mod_base = OTHER; note = 2'-deoxy-2'-fluoroguanosine-3'-phosphate
  modified_base 21: mod_base = OTHER; note = 2'-O-methylguanosine-3'-phosphorothioate
  modified_base 22: mod_base = OTHER; note = 2'-O-methylcytidine-3'-phosphorothioate
  modified_base 23: mod_base = OTHER; note = 2'-O-methylcytidine
acgcagtttctctcatccaggcc

SEQ ID NO: 462 - RNA, 23 nt, synthetic construct
  source 1..23: mol_type = other RNA
  modified_base 1: mod_base = OTHER; note = 2'-O-methyluridine-3'-phosphorothioate
  modified_base 2: mod_base = OTHER; note = 2'-deoxy-2'-fluoroadenosine-3'-phosphorothioate
  modified_base 3: mod_base = OTHER; note = 2'-O-methyladenosine-3'-phosphate
  modified_base 4: mod_base = OTHER; note = 2'-deoxy-2'-fluoroguanosine-3'-phosphate
  modified_base 5: mod_base = OTHER; note = 2'-O-methyladenosine-3'-phosphate
  modified_base 6: mod_base = OTHER; note = 2'-deoxy-2'-fluorouridine-3'-phosphate
  modified_base 7: mod_base = OTHER; note = 2'-O-methylcytidine-3'-phosphate
  modified_base 8: mod_base = OTHER; note = 2'-deoxy-2'-fluorocytidine-3'-phosphate
  modified_base 9: mod_base = OTHER; note = 2'-O-methyluridine-3'-phosphate
  modified_base 10: mod_base = OTHER; note = 2'-deoxy-2'-fluoroguanosine-3'-phosphate
  modified_base 11: mod_base = OTHER; note = 2'-O-methylguanosine-3'-phosphate
  modified_base 12: mod_base = OTHER; note = 2'-O-methylguanosine-3'-phosphate
  modified_base 13: mod_base = OTHER; note = 2'-O-methyladenosine-3'-phosphate
  modified_base 14: mod_base = OTHER; note = 2'-deoxy-2'-fluoroguanosine-3'-phosphate
  modified_base 15: mod_base = OTHER; note = 2'-O-methyladenosine-3'-phosphate
  modified_base 16: mod_base = OTHER; note = 2'-deoxy-2'-fluoroadenosine-3'-phosphate
  modified_base 17: mod_base = OTHER; note = 2'-O-methylguanosine-3'-phosphate
  modified_base 18: mod_base = OTHER; note = 2'-deoxy-2'-fluorouridine-3'-phosphate
  modified_base 19: mod_base = OTHER; note = 2'-O-methylguanosine-3'-phosphate
  modified_base 20: mod_base = OTHER; note = 2'-deoxy-2'-fluoroguanosine-3'-phosphate
  modified_base 21: mod_base = OTHER; note = 2'-O-methylcytidine-3'-phosphorothioate
  modified_base 22: mod_base = OTHER; note = 2'-O-methylguanosine-3'-phosphorothioate
  modified_base 23: mod_base = OTHER; note = 2'-O-methyladenosine
taagatcctgggagaagtggcga

SEQ ID NO: 463 - RNA, 23 nt, synthetic construct
  source 1..23: mol_type = other RNA
  modified_base 1: mod_base = OTHER; note = 2'-O-methyluridine-3'-phosphorothioate
  modified_base 2: mod_base = OTHER; note = 2'-deoxy-2'-fluoroadenosine-3'-phosphorothioate
  modified_base 3: mod_base = OTHER; note = 2'-O-methylcytidine-3'-phosphate
  modified_base 4: mod_base = OTHER; note = 2'-deoxy-2'-fluoroadenosine-3'-phosphate
  modified_base 5: mod_base = OTHER; note = 2'-O-methyladenosine-3'-phosphate
  modified_base 6: mod_base = OTHER; note = 2'-deoxy-2'-fluoroguanosine-3'-phosphate
  modified_base 7: mod_base = OTHER; note = 2'-O-methylcytidine-3'-phosphate
  modified_base 8: mod_base = OTHER; note = 2'-deoxy-2'-fluorocytidine-3'-phosphate
  modified_base 9: mod_base = OTHER; note = 2'-O-methyladenosine-3'-phosphate
  modified_base 10: mod_base = OTHER; note = 2'-deoxy-2'-fluorouridine-3'-phosphate
  modified_base 11: mod_base = OTHER; note = 2'-O-methyladenosine-3'-phosphate
  modified_base 12: mod_base = OTHER; note = 2'-O-methylguanosine-3'-phosphate
  modified_base 13: mod_base = OTHER; note = 2'-O-methyluridine-3'-phosphate
  modified_base 14: mod_base = OTHER; note = 2'-deoxy-2'-fluoroguanosine-3'-phosphate
  modified_base 15: mod_base = OTHER; note = 2'-O-methylcytidine-3'-phosphate
  modified_base 16: mod_base = OTHER; note = 2'-deoxy-2'-fluoroadenosine-3'-phosphate
  modified_base 17: mod_base = OTHER; note = 2'-O-methylcytidine-3'-phosphate
  modified_base 18: mod_base = OTHER; note = 2'-deoxy-2'-fluorocytidine-3'-phosphate
  modified_base 19: mod_base = OTHER; note = 2'-O-methylcytidine-3'-phosphate
  modified_base 20: mod_base = OTHER; note = 2'-deoxy-2'-fluoroguanosine-3'-phosphate
  modified_base 21: mod_base = OTHER; note = 2'-O-methylcytidine-3'-phosphorothioate
  modified_base 22: mod_base = OTHER; note = 2'-O-methyladenosine-3'-phosphorothioate
  modified_base 23: mod_base = OTHER; note = 2'-O-methylcytidine
tacaagccatagtgcacccgcac

SEQ ID NO: 464 - RNA, 23 nt, synthetic construct
  source 1..23: mol_type = other RNA
  modified_base 1: mod_base = OTHER; note = 2'-O-methyluridine-3'-phosphorothioate
  modified_base 2: mod_base = OTHER; note = 2'-deoxy-2'-fluorouridine-3'-phosphorothioate
  modified_base 3: mod_base = OTHER; note = 2'-O-methyluridine-3'-phosphate
  modified_base 4: mod_base = OTHER; note = 2'-deoxy-2'-fluorocytidine-3'-phosphate
  modified_base 5: mod_base = OTHER; note = 2'-O-methyluridine-3'-phosphate
  modified_base 6: mod_base = OTHER; note = 2'-deoxy-2'-fluorocytidine-3'-phosphate
  modified_base 7: mod_base = OTHER; note = 2'-O-methyluridine-3'-phosphate
  modified_base 8: mod_base = OTHER; note = 2'-deoxy-2'-fluorocytidine-3'-phosphate
  modified_base 9: mod_base = OTHER; note = 2'-O-methyladenosine-3'-phosphate
  modified_base 10: mod_base = OTHER; note = 2'-deoxy-2'-fluorouridine-3'-phosphate
  modified_base 11: mod_base = OTHER; note = 2'-O-methylcytidine-3'-phosphate
  modified_base 12: mod_base = OTHER; note = 2'-O-methylcytidine-3'-phosphate
  modified_base 13: mod_base = OTHER; note = 2'-O-methyladenosine-3'-phosphate
  modified_base 14: mod_base = OTHER; note = 2'-deoxy-2'-fluoroguanosine-3'-phosphate
  modified_base 15: mod_base = OTHER; note = 2'-O-methylguanosine-3'-phosphate
  modified_base 16: mod_base = OTHER; note = 2'-deoxy-2'-fluorocytidine-3'-phosphate
  modified_base 17: mod_base = OTHER; note = 2'-O-methylcytidine-3'-phosphate
  modified_base 18: mod_base = OTHER; note = 2'-deoxy-2'-fluoroguanosine-3'-phosphate
  modified_base 19: mod_base = OTHER; note = 2'-O-methyluridine-3'-phosphate
  modified_base 20: mod_base = OTHER; note = 2'-deoxy-2'-fluorouridine-3'-phosphate
  modified_base 21: mod_base = OTHER; note = 2'-O-methylguanosine-3'-phosphorothioate
  modified_base 22: mod_base = OTHER; note = 2'-O-methylguanosine-3'-phosphorothioate
  modified_base 23: mod_base = OTHER; note = 2'-O-methylguanosine
tttctctcatccaggccgttggg

SEQ ID NO: 465 - RNA, 23 nt, synthetic construct
  source 1..23: mol_type = other RNA
  modified_base 1: mod_base = OTHER; note = 2'-O-methylcytidine-3'-phosphorothioate
  modified_base 2: mod_base = OTHER; note = 2'-deoxy-2'-fluorocytidine-3'-phosphorothioate
  modified_base 3: mod_base = OTHER; note = 2'-O-methyladenosine-3'-phosphate
  modified_base 4: mod_base = OTHER; note = 2'-deoxy-2'-fluorocytidine-3'-phosphate
  modified_base 5: mod_base = OTHER; note = 2'-O-methyladenosine-3'-phosphate
  modified_base 6: mod_base = OTHER; note = 2'-deoxy-2'-fluorocytidine-3'-phosphate
  modified_base 7: mod_base = OTHER; note = 2'-O-methyladenosine-3'-phosphate
  modified_base 8: mod_base = OTHER; note = 2'-deoxy-2'-fluoroguanosine-3'-phosphate
  modified_base 9: mod_base = OTHER; note = 2'-O-methylcytidine-3'-phosphate
  modified_base 10: mod_base = OTHER; note = 2'-deoxy-2'-fluorocytidine-3'-phosphate
  modified_base 11: mod_base = OTHER; note = 2'-O-methyluridine-3'-phosphate
  modified_base 12: mod_base = OTHER; note = 2'-O-methylcytidine-3'-phosphate
  modified_base 13: mod_base = OTHER; note = 2'-O-methylcytidine-3'-phosphate
  modified_base 14: mod_base = OTHER; note = 2'-deoxy-2'-fluorouridine-3'-phosphate
  modified_base 15: mod_base = OTHER; note = 2'-O-methylguanosine-3'-phosphate
  modified_base 16: mod_base = OTHER; note = 2'-deoxy-2'-fluorouridine-3'-phosphate
  modified_base 17: mod_base = OTHER; note = 2'-O-methyluridine-3'-phosphate
  modified_base 18: mod_base = OTHER; note = 2'-deoxy-2'-fluorocytidine-3'-phosphate
  modified_base 19: mod_base = OTHER; note = 2'-O-methyluridine-3'-phosphate
  modified_base 20: mod_base = OTHER; note = 2'-deoxy-2'-fluoroguanosine-3'-phosphate
  modified_base 21: mod_base = OTHER; note = 2'-O-methylguanosine-3'-phosphorothioate
  modified_base 22: mod_base = OTHER; note = 2'-O-methyladenosine-3'-phosphorothioate
  modified_base 23: mod_base = OTHER; note = 2'-O-methyluridine
ccacacagcctcctgttctggat

SEQ ID NO: 466 - RNA, 23 nt, synthetic construct
  source 1..23: mol_type = other RNA
  modified_base 1: mod_base = OTHER; note = 2'-O-methyluridine-3'-phosphorothioate
  modified_base 2: mod_base = OTHER; note = 2'-deoxy-2'-fluorocytidine-3'-phosphorothioate
  modified_base 3: mod_base = OTHER; note = 2'-O-methylcytidine-3'-phosphate
  modified_base 4: mod_base = OTHER; note = 2'-deoxy-2'-fluorocytidine-3'-phosphate
  modified_base 5: mod_base = OTHER; note = 2'-O-methylcytidine-3'-phosphate
  modified_base 6: mod_base = OTHER; note = 2'-deoxy-2'-fluoroadenosine-3'-phosphate
  modified_base 7: mod_base = OTHER; note = 2'-O-methylcytidine-3'-phosphate
  modified_base 8: mod_base = OTHER; note = 2'-deoxy-2'-fluoroadenosine-3'-phosphate
  modified_base 9: mod_base = OTHER; note = 2'-O-methylguanosine-3'-phosphate
  modified_base 10: mod_base = OTHER; note = 2'-deoxy-2'-fluoroadenosine-3'-phosphate
  modified_base 11: mod_base = OTHER; note = 2'-O-methyluridine-3'-phosphate
  modified_base 12: mod_base = OTHER; note = 2'-O-methylguanosine-3'-phosphate
  modified_base 13: mod_base = OTHER; note = 2'-O-methyluridine-3'-phosphate
  modified_base 14: mod_base = OTHER; note = 2'-deoxy-2'-fluoroguanosine-3'-phosphate
  modified_base 15: mod_base = OTHER; note = 2'-O-methyluridine-3'-phosphate
  modified_base 16: mod_base = OTHER; note = 2'-deoxy-2'-fluorocytidine-3'-phosphate
  modified_base 17: mod_base = OTHER; note = 2'-O-methylguanosine-3'-phosphate
  modified_base 18: mod_base = OTHER; note = 2'-deoxy-2'-fluoroadenosine-3'-phosphate
  modified_base 19: mod_base = OTHER; note = 2'-O-methylcytidine-3'-phosphate
  modified_base 20: mod_base = OTHER; note = 2'-deoxy-2'-fluorocytidine-3'-phosphate
  modified_base 21: mod_base = OTHER; note = 2'-O-methylcytidine-3'-phosphorothioate
  modified_base 22: mod_base = OTHER; note = 2'-O-methylcytidine-3'-phosphorothioate
  modified_base 23: mod_base = OTHER; note = 2'-O-methylguanosine
tccccacagatgtgtcgaccccg

SEQ ID NO: 467 - RNA, 23 nt, synthetic construct
  source 1..23: mol_type = other RNA
  modified_base 1: mod_base = OTHER; note = 2'-O-methyluridine-3'-phosphorothioate
  modified_base 2: mod_base = OTHER; note = 2'-deoxy-2'-fluorouridine-3'-phosphorothioate
  modified_base 3: mod_base = OTHER; note = 2'-O-methylcytidine-3'-phosphate
  modified_base 4: mod_base = OTHER; note = 2'-deoxy-2'-fluorouridine-3'-phosphate
  modified_base 5: mod_base = OTHER; note = 2'-O-methylcytidine-3'-phosphate
  modified_base 6: mod_base = OTHER; note = 2'-deoxy-2'-fluoroadenosine-3'-phosphate
  modified_base 7: mod_base = OTHER; note = 2'-O-methyluridine-3'-phosphate
  modified_base 8: mod_base = OTHER; note = 2'-deoxy-2'-fluorocytidine-3'-phosphate
  modified_base 9: mod_base = OTHER; note = 2'-O-methylcytidine-3'-phosphate
  modified_base 10: mod_base = OTHER; note = 2'-deoxy-2'-fluoroadenosine-3'-phosphate
  modified_base 11: mod_base = OTHER; note = 2'-O-methylguanosine-3'-phosphate
  modified_base 12: mod_base = OTHER; note = 2'-O-methylguanosine-3'-phosphate
  modified_base 13: mod_base = OTHER; note = 2'-O-methylcytidine-3'-phosphate
  modified_base 14: mod_base = OTHER; note = 2'-deoxy-2'-fluorocytidine-3'-phosphate
  modified_base 15: mod_base = OTHER; note = 2'-O-methylguanosine-3'-phosphate
  modified_base 16: mod_base = OTHER; note = 2'-deoxy-2'-fluorouridine-3'-phosphate
  modified_base 17: mod_base = OTHER; note = 2'-O-methyluridine-3'-phosphate
  modified_base 18: mod_base = OTHER; note = 2'-deoxy-2'-fluoroguanosine-3'-phosphate
  modified_base 19: mod_base = OTHER; note = 2'-O-methylguanosine-3'-phosphate
  modified_base 20: mod_base = OTHER; note = 2'-deoxy-2'-fluoroguanosine-3'-phosphate
  modified_base 21: mod_base = OTHER; note = 2'-O-methylguanosine-3'-phosphorothioate
  modified_base 22: mod_base = OTHER; note = 2'-O-methylcytidine-3'-phosphorothioate
  modified_base 23: mod_base = OTHER; note = 2'-O-methyladenosine
ttctcatccaggccgttggggca

SEQ ID NO: 468 - RNA, 23 nt, synthetic construct
  source 1..23: mol_type = other RNA
  modified_base 1: mod_base = OTHER; note = 2'-O-methyluridine-3'-phosphorothioate
  modified_base 2: mod_base = OTHER; note = 2'-deoxy-2'-fluorocytidine-3'-phosphorothioate
  modified_base 3: mod_base = OTHER; note = 2'-O-methyluridine-3'-phosphate
  modified_base 4: mod_base = OTHER; note = 2'-deoxy-2'-fluorocytidine-3'-phosphate
  modified_base 5: mod_base = OTHER; note = 2'-O-methyladenosine-3'-phosphate
  modified_base 6: mod_base = OTHER; note = 2'-deoxy-2'-fluorouridine-3'-phosphate
  modified_base 7: mod_base = OTHER; note = 2'-O-methylcytidine-3'-phosphate
  modified_base 8: mod_base = OTHER; note = 2'-deoxy-2'-fluorocytidine-3'-phosphate
  modified_base 9: mod_base = OTHER; note = 2'-O-methyladenosine-3'-phosphate
  modified_base 10: mod_base = OTHER; note = 2'-deoxy-2'-fluoroguanosine-3'-phosphate
  modified_base 11: mod_base = OTHER; note = 2'-O-methylguanosine-3'-phosphate
  modified_base 12: mod_base = OTHER; note = 2'-O-methylcytidine-3'-phosphate
  modified_base 13: mod_base = OTHER; note = 2'-O-methylcytidine-3'-phosphate
  modified_base 14: mod_base = OTHER; note = 2'-deoxy-2'-fluoroguanosine-3'-phosphate
  modified_base 15: mod_base = OTHER; note = 2'-O-methyluridine-3'-phosphate
  modified_base 16: mod_base = OTHER; note = 2'-deoxy-2'-fluorouridine-3'-phosphate
  modified_base 17: mod_base = OTHER; note = 2'-O-methylguanosine-3'-phosphate
  modified_base 18: mod_base = OTHER; note = 2'-deoxy-2'-fluoroguanosine-3'-phosphate
  modified_base 19: mod_base = OTHER; note = 2'-O-methylguanosine-3'-phosphate
  modified_base 20: mod_base = OTHER; note = 2'-deoxy-2'-fluoroguanosine-3'-phosphate
  modified_base 21: mod_base = OTHER; note = 2'-O-methylcytidine-3'-phosphorothioate
  modified_base 22: mod_base = OTHER; note = 2'-O-methyladenosine-3'-phosphorothioate
  modified_base 23: mod_base = OTHER; note = 2'-O-methylguanosine
tctcatccaggccgttggggcag

SEQ ID NO: 469 - RNA, 23 nt, synthetic construct
  source 1..23: mol_type = other RNA
  modified_base 1: mod_base = OTHER; note = 2'-O-methyluridine-3'-phosphorothioate
  modified_base 2: mod_base = OTHER; note = 2'-deoxy-2'-fluoroadenosine-3'-phosphorothioate
  modified_base 3: mod_base = OTHER; note = 2'-O-methylguanosine-3'-phosphate
  modified_base 4: mod_base = OTHER; note = 2'-deoxy-2'-fluoroadenosine-3'-phosphate
  modified_base 5: mod_base = OTHER; note = 2'-O-methylguanosine-3'-phosphate
  modified_base 6: mod_base = OTHER; note = 2'-deoxy-2'-fluoroguanosine-3'-phosphate
  modified_base 7: mod_base = OTHER; note = 2'-O-methyladenosine-3'-phosphate
  modified_base 8: mod_base = OTHER; note = 2'-deoxy-2'-fluoroadenosine-3'-phosphate
  modified_base 9: mod_base = OTHER; note = 2'-O-methylcytidine-3'-phosphate
  modified_base 10: mod_base = OTHER; note = 2'-deoxy-2'-fluorouridine-3'-phosphate
  modified_base 11: mod_base = OTHER; note = 2'-O-methylcytidine-3'-phosphate
  modified_base 12: mod_base = OTHER; note = 2'-O-methyluridine-3'-phosphate
  modified_base 13: mod_base = OTHER; note = 2'-O-methylcytidine-3'-phosphate
  modified_base 14: mod_base = OTHER; note = 2'-deoxy-2'-fluorocytidine-3'-phosphate
  modified_base 15: mod_base = OTHER; note = 2'-O-methyladenosine-3'-phosphate
  modified_base 16: mod_base = OTHER; note = 2'-deoxy-2'-fluoroguanosine-3'-phosphate
  modified_base 17: mod_base = OTHER; note = 2'-O-methylguanosine-3'-phosphate
  modified_base 18: mod_base = OTHER; note = 2'-deoxy-2'-fluoroguanosine-3'-phosphate
  modified_base 19: mod_base = OTHER; note = 2'-O-methylcytidine-3'-phosphate
  modified_base 20: mod_base = OTHER; note = 2'-deoxy-2'-fluoroadenosine-3'-phosphate
  modified_base 21: mod_base = OTHER; note = 2'-O-methylguanosine-3'-phosphorothioate
  modified_base 22: mod_base = OTHER; note = 2'-O-methylguanosine-3'-phosphorothioate
  modified_base 23: mod_base = OTHER; note = 2'-O-methylguanosine
tagaggaactctccagggcaggg

SEQ ID NO: 470 - RNA, 23 nt, synthetic construct
  source 1..23: mol_type = other RNA
  modified_base 1: mod_base = OTHER; note = 2'-O-methyluridine-3'-phosphorothioate
  modified_base 2: mod_base = OTHER; note = 2'-deoxy-2'-fluorocytidine-3'-phosphorothioate
  modified_base 3: mod_base = OTHER; note = 2'-O-methylcytidine-3'-phosphate
  modified_base 4: mod_base = OTHER; note = 2'-deoxy-2'-fluoroadenosine-3'-phosphate
  modified_base 5: mod_base = OTHER; note = 2'-O-methylcytidine-3'-phosphate
  modified_base 6: mod_base = OTHER; note = 2'-deoxy-2'-fluoroadenosine-3'-phosphate
  modified_base 7: mod_base = OTHER; note = 2'-O-methylguanosine-3'-phosphate
  modified_base 8: mod_base = OTHER; note = 2'-deoxy-2'-fluoroadenosine-3'-phosphate
  modified_base 9: mod_base = OTHER; note = 2'-O-methyluridine-3'-phosphate
  modified_base 10: mod_base = OTHER; note = 2'-deoxy-2'-fluoroguanosine-3'-phosphate
  modified_base 11: mod_base = OTHER; note = 2'-O-methyluridine-3'-phosphate
  modified_base 12: mod_base = OTHER; note = 2'-O-methylguanosine-3'-phosphate
  modified_base 13: mod_base = OTHER; note = 2'-O-methyluridine-3'-phosphate
  modified_base 14: mod_base = OTHER; note = 2'-deoxy-2'-fluorocytidine-3'-phosphate
  modified_base 15: mod_base = OTHER; note = 2'-O-methylguanosine-3'-phosphate
  modified_base 16: mod_base = OTHER; note = 2'-deoxy-2'-fluoroadenosine-3'-phosphate
  modified_base 17: mod_base = OTHER; note = 2'-O-methylcytidine-3'-phosphate
  modified_base 18: mod_base = OTHER; note = 2'-deoxy-2'-fluorocytidine-3'-phosphate
  modified_base 19: mod_base = OTHER; note = 2'-O-methylcytidine-3'-phosphate
  modified_base 20: mod_base = OTHER; note = 2'-deoxy-2'-fluorocytidine-3'-phosphate
  modified_base 21: mod_base = OTHER; note = 2'-O-methylguanosine-3'-phosphorothioate
  modified_base 22: mod_base = OTHER; note = 2'-O-methyladenosine-3'-phosphorothioate
  modified_base 23: mod_base = OTHER; note = 2'-O-methyladenosine
tccacagatgtgtcgaccccgaa

SEQ ID NO: 471 - RNA, 23 nt, synthetic construct
  source 1..23: mol_type = other RNA
  modified_base 1: mod_base = OTHER; note = 2'-O-methyluridine-3'-phosphorothioate
  modified_base 2: mod_base = OTHER; note = 2'-deoxy-2'-fluorocytidine-3'-phosphorothioate
  modified_base 3: mod_base = OTHER; note = 2'-O-methylcytidine-3'-phosphate
  modified_base 4: mod_base = OTHER; note = 2'-deoxy-2'-fluoroguanosine-3'-phosphate
  modified_base 5: mod_base = OTHER; note = 2'-O-methylcytidine-3'-phosphate
  modified_base 6: mod_base = OTHER; note = 2'-deoxy-2'-fluorocytidine-3'-phosphate
  modified_base 7: mod_base = OTHER; note = 2'-O-methyluridine-3'-phosphate
  modified_base 8: mod_base = OTHER; note = 2'-deoxy-2'-fluorouridine-3'-phosphate
  modified_base 9: mod_base = OTHER; note = 2'-O-methylguanosine-3'-phosphate
  modified_base 10: mod_base = OTHER; note = 2'-deoxy-2'-fluorouridine-3'-phosphate
  modified_base 11: mod_base = OTHER; note = 2'-O-methyladenosine-3'-phosphate
  modified_base 12: mod_base = OTHER; note = 2'-O-methylcytidine-3'-phosphate
  modified_base 13: mod_base = OTHER; note = 2'-O-methylcytidine-3'-phosphate
  modified_base 14: mod_base = OTHER; note = 2'-deoxy-2'-fluorocytidine-3'-phosphate
  modified_base 15: mod_base = OTHER; note = 2'-O-methyluridine-3'-phosphate
  modified_base 16: mod_base = OTHER; note = 2'-deoxy-2'-fluoroadenosine-3'-phosphate
  modified_base 17: mod_base = OTHER; note = 2'-O-methylguanosine-3'-phosphate
  modified_base 18: mod_base = OTHER; note = 2'-deoxy-2'-fluoroguanosine-3'-phosphate
  modified_base 19: mod_base = OTHER; note = 2'-O-methyladenosine-3'-phosphate
  modified_base 20: mod_base = OTHER; note = 2'-deoxy-2'-fluoroadenosine-3'-phosphate
  modified_base 21: mod_base = OTHER; note = 2'-O-methyladenosine-3'-phosphorothioate
  modified_base 22: mod_base = OTHER; note = 2'-O-methyluridine-3'-phosphorothioate
  modified_base 23: mod_base = OTHER; note = 2'-O-methyladenosine
tccgccttgtaccctaggaaata

SEQ ID NO: 472 - RNA, 23 nt, synthetic construct
  source 1..23: mol_type = other RNA
  modified_base 1: mod_base = OTHER; note = 2'-O-methyluridine-3'-phosphorothioate
  modified_base 2: mod_base = OTHER; note = 2'-deoxy-2'-fluoroadenosine-3'-phosphorothioate
  modified_base 3: mod_base = OTHER; note = 2'-O-methyluridine-3'-phosphate
  modified_base 4: mod_base = OTHER; note = 2'-deoxy-2'-fluorocytidine-3'-phosphate
  modified_base 5: mod_base = OTHER; note = 2'-O-methylcytidine-3'-phosphate
  modified_base 6: mod_base = OTHER; note = 2'-deoxy-2'-fluoroadenosine-3'-phosphate
  modified_base 7: mod_base = OTHER; note = 2'-O-methylguanosine-3'-phosphate
  modified_base 8: mod_base = OTHER; note = 2'-deoxy-2'-fluoroguanosine-3'-phosphate
  modified_base 9: mod_base = OTHER; note = 2'-O-methylcytidine-3'-phosphate
  modified_base 10: mod_base = OTHER; note = 2'-deoxy-2'-fluorocytidine-3'-phosphate
  modified_base 11: mod_base = OTHER; note = 2'-O-methylguanosine-3'-phosphate
  modified_base 12: mod_base = OTHER; note = 2'-O-methyluridine-3'-phosphate
  modified_base 13: mod_base = OTHER; note = 2'-O-methyluridine-3'-phosphate
  modified_base 14: mod_base = OTHER; note = 2'-deoxy-2'-fluoroguanosine-3'-phosphate
  modified_base 15: mod_base = OTHER; note = 2'-O-methylguanosine-3'-phosphate
  modified_base 16: mod_base = OTHER; note = 2'-deoxy-2'-fluoroguanosine-3'-phosphate
  modified_base 17: mod_base = OTHER; note = 2'-O-methylguanosine-3'-phosphate
  modified_base 18: mod_base = OTHER; note = 2'-deoxy-2'-fluorocytidine-3'-phosphate
  modified_base 19: mod_base = OTHER; note = 2'-O-methyladenosine-3'-phosphate
  modified_base 20: mod_base = OTHER; note = 2'-deoxy-2'-fluoroguanosine-3'-phosphate
  modified_base 21: mod_base = OTHER; note = 2'-O-methyluridine-3'-phosphorothioate
  modified_base 22: mod_base = OTHER; note = 2'-O-methylcytidine-3'-phosphorothioate
  modified_base 23: mod_base = OTHER; note = 2'-O-methylcytidine
tatccaggccgttggggcagtcc

SEQ ID NO: 473 - RNA, 23 nt, synthetic construct
  source 1..23: mol_type = other RNA
  modified_base 1: mod_base = OTHER; note = 2'-O-methyluridine-3'-phosphorothioate
  modified_base 2: mod_base = OTHER; note = 2'-deoxy-2'-fluorocytidine-3'-phosphorothioate
  modified_base 3: mod_base = OTHER; note = 2'-O-methylcytidine-3'-phosphate
  modified_base 4: mod_base = OTHER; note = 2'-deoxy-2'-fluorocytidine-3'-phosphate
  modified_base 5: mod_base = OTHER; note = 2'-O-methyladenosine-3'-phosphate
  modified_base 6: mod_base = OTHER; note = 2'-deoxy-2'-fluorocytidine-3'-phosphate
  modified_base 7: mod_base = OTHER; note = 2'-O-methyladenosine-3'-phosphate
  modified_base 8: mod_base = OTHER; note = 2'-deoxy-2'-fluoroguanosine-3'-phosphate
  modified_base 9: mod_base = OTHER; note = 2'-O-methyladenosine-3'-phosphate
  modified_base 10: mod_base = OTHER; note = 2'-deoxy-2'-fluorouridine-3'-phosphate
  modified_base 11: mod_base = OTHER; note = 2'-O-methylguanosine-3'-phosphate
  modified_base 12: mod_base = OTHER; note = 2'-O-methyluridine-3'-phosphate
  modified_base 13: mod_base = OTHER; note = 2'-O-methylguanosine-3'-phosphate
  modified_base 14: mod_base = OTHER; note = 2'-deoxy-2'-fluorouridine-3'-phosphate
  modified_base 15: mod_base = OTHER; note = 2'-O-methylcytidine-3'-phosphate
  modified_base 16: mod_base = OTHER; note = 2'-deoxy-2'-fluoroguanosine-3'-phosphate
  modified_base 17: mod_base = OTHER; note = 2'-O-methyladenosine-3'-phosphate
  modified_base 18: mod_base = OTHER; note = 2'-deoxy-2'-fluorocytidine-3'-phosphate
  modified_base 19: mod_base = OTHER; note = 2'-O-methylcytidine-3'-phosphate
  modified_base 20: mod_base = OTHER; note = 2'-deoxy-2'-fluorocytidine-3'-phosphate
  modified_base 21: mod_base = OTHER; note = 2'-O-methylcytidine-3'-phosphorothioate
  modified_base 22: mod_base = OTHER; note = 2'-O-methylguanosine-3'-phosphorothioate
  modified_base 23: mod_base = OTHER; note = 2'-O-methyladenosine
tcccacagatgtgtcgaccccga

SEQ ID NO: 474 - RNA, 23 nt, synthetic construct
  source 1..23: mol_type = other RNA
  modified_base 1: mod_base = OTHER; note = 2'-O-methyluridine-3'-phosphorothioate
  modified_base 2: mod_base = OTHER; note = 2'-deoxy-2'-fluorocytidine-3'-phosphorothioate
  modified_base 3: mod_base = OTHER; note = 2'-O-methyladenosine-3'-phosphate
  modified_base 4: mod_base = OTHER; note = 2'-deoxy-2'-fluorouridine-3'-phosphate
  modified_base 5: mod_base = OTHER; note = 2'-O-methylcytidine-3'-phosphate
  modified_base 6: mod_base = OTHER; note = 2'-deoxy-2'-fluorocytidine-3'-phosphate
  modified_base 7: mod_base = OTHER; note = 2'-O-methyladenosine-3'-phosphate
  modified_base 8: mod_base = OTHER; note = 2'-deoxy-2'-fluoroguanosine-3'-phosphate
  modified_base 9: mod_base = OTHER; note = 2'-O-methylguanosine-3'-phosphate
  modified_base 10: mod_base = OTHER; note = 2'-deoxy-2'-fluorocytidine-3'-phosphate
  modified_base 11: mod_base = OTHER; note = 2'-O-methylcytidine-3'-phosphate
  modified_base 12: mod_base = OTHER; note = 2'-O-methylguanosine-3'-phosphate
  modified_base 13: mod_base = OTHER; note = 2'-O-methyluridine-3'-phosphate
  modified_base 14: mod_base = OTHER; note = 2'-deoxy-2'-fluorouridine-3'-phosphate
  modified_base 15: mod_base = OTHER; note = 2'-O-methylguanosine-3'-phosphate
  modified_base 16: mod_base = OTHER; note = 2'-deoxy-2'-fluoroguanosine-3'-phosphate
  modified_base 17: mod_base = OTHER; note = 2'-O-methylguanosine-3'-phosphate
  modified_base 18: mod_base = OTHER; note = 2'-deoxy-2'-fluoroguanosine-3'-phosphate
  modified_base 19: mod_base = OTHER; note = 2'-O-methylcytidine-3'-phosphate
  modified_base 20: mod_base = OTHER; note = 2'-deoxy-2'-fluoroadenosine-3'-phosphate
  modified_base 21: mod_base = OTHER; note = 2'-O-methylguanosine-3'-phosphorothioate
  modified_base 22: mod_base = OTHER; note = 2'-O-methyluridine-3'-phosphorothioate
  modified_base 23: mod_base = OTHER; note = 2'-O-methylcytidine
tcatccaggccgttggggcagtc

SEQ ID NO: 475 - RNA, 23 nt, synthetic construct
  source 1..23: mol_type = other RNA
  modified_base 1: mod_base = OTHER; note = 2'-O-methyluridine-3'-phosphorothioate
  modified_base 2: mod_base = OTHER; note = 2'-deoxy-2'-fluorocytidine-3'-phosphorothioate
  modified_base 3: mod_base = OTHER; note = 2'-O-methylguanosine-3'-phosphate
  modified_base 4: mod_base = OTHER; note = 2'-deoxy-2'-fluorocytidine-3'-phosphate
  modified_base 5: mod_base = OTHER; note = 2'-O-methylcytidine-3'-phosphate
  modified_base 6: mod_base = OTHER; note = 2'-deoxy-2'-fluorouridine-3'-phosphate
  modified_base 7: mod_base = OTHER; note = 2'-O-methyluridine-3'-phosphate
  modified_base 8: mod_base = OTHER; note = 2'-deoxy-2'-fluoroguanosine-3'-phosphate
  modified_base 9: mod_base = OTHER; note = 2'-O-methyluridine-3'-phosphate
  modified_base 10: mod_base = OTHER; note = 2'-deoxy-2'-fluoroadenosine-3'-phosphate
  modified_base 11: mod_base = OTHER; note = 2'-O-methylcytidine-3'-phosphate
  modified_base 12: mod_base = OTHER; note = 2'-O-methylcytidine-3'-phosphate
  modified_base 13: mod_base = OTHER; note = 2'-O-methylcytidine-3'-phosphate
  modified_base 14: mod_base = OTHER; note = 2'-deoxy-2'-fluorouridine-3'-phosphate
  modified_base 15: mod_base = OTHER; note = 2'-O-methyladenosine-3'-phosphate
  modified_base 16: mod_base = OTHER; note = 2'-deoxy-2'-fluoroguanosine-3'-phosphate
  modified_base 17: mod_base = OTHER; note = 2'-O-methylguanosine-3'-phosphate
  modified_base 18: mod_base = OTHER; note = 2'-deoxy-2'-fluoroadenosine-3'-phosphate
  modified_base 19: mod_base = OTHER; note = 2'-O-methyladenosine-3'-phosphate
  modified_base 20: mod_base = OTHER; note = 2'-deoxy-2'-fluoroadenosine-3'-phosphate
  modified_base 21: mod_base = OTHER; note = 2'-O-methyluridine-3'-phosphorothioate
  modified_base 22: mod_base = OTHER; note = 2'-O-methyladenosine-3'-phosphorothioate
  modified_base 23: mod_base = OTHER; note = 2'-O-methylcytidine
tcgccttgtaccctaggaaatac

SEQ ID NO: 476 - RNA, 23 nt, synthetic construct
  source 1..23: mol_type = other RNA
  modified_base 1: mod_base = OTHER; note = 2'-O-methyladenosine-3'-phosphorothioate
  modified_base 2: mod_base = OTHER; note = 2'-deoxy-2'-fluoroguanosine-3'-phosphorothioate
  modified_base 3: mod_base = OTHER; note = 2'-O-methylguanosine-3'-phosphate
  modified_base 4: mod_base = OTHER; note = 2'-deoxy-2'-fluoroadenosine-3'-phosphate
  modified_base 5: mod_base = OTHER; note = 2'-O-methyladenosine-3'-phosphate
  modified_base 6: mod_base = OTHER; note = 2'-deoxy-2'-fluorocytidine-3'-phosphate
  modified_base 7: mod_base = OTHER; note = 2'-O-methyluridine-3'-phosphate
  modified_base 8: mod_base = OTHER; note = 2'-deoxy-2'-fluorocytidine-3'-phosphate
  modified_base 9: mod_base = OTHER; note = 2'-O-methyluridine-3'-phosphate
  modified_base 10: mod_base = OTHER; note = 2'-deoxy-2'-fluorocytidine-3'-phosphate
  modified_base 11: mod_base = OTHER; note = 2'-O-methylcytidine-3'-phosphate
  modified_base 12: mod_base = OTHER; note = 2'-O-methyladenosine-3'-phosphate
  modified_base 13: mod_base = OTHER; note = 2'-O-methylguanosine-3'-phosphate
  modified_base 14: mod_base = OTHER; note = 2'-deoxy-2'-fluoroguanosine-3'-phosphate
  modified_base 15: mod_base = OTHER; note = 2'-O-methylguanosine-3'-phosphate
  modified_base 16: mod_base = OTHER; note = 2'-deoxy-2'-fluorocytidine-3'-phosphate
  modified_base 17: mod_base = OTHER; note = 2'-O-methyladenosine-3'-phosphate
  modified_base 18: mod_base = OTHER; note = 2'-deoxy-2'-fluoroguanosine-3'-phosphate
  modified_base 19: mod_base = OTHER; note = 2'-O-methylguanosine-3'-phosphate
  modified_base 20: mod_base = OTHER; note = 2'-deoxy-2'-fluoroguanosine-3'-phosphate
  modified_base 21: mod_base = OTHER; note = 2'-O-methylguanosine-3'-phosphorothioate
  modified_base 22: mod_base = OTHER; note = 2'-O-methyluridine-3'-phosphorothioate
  modified_base 23: mod_base = OTHER; note = 2'-O-methylcytidine
aggaactctccagggcaggggtc

SEQ ID NO: 477 - RNA, 23 nt, synthetic construct
  source 1..23: mol_type = other RNA
  modified_base 1: mod_base = OTHER; note = 2'-O-methyluridine-3'-phosphorothioate
  modified_base 2: mod_base = OTHER; note = 2'-deoxy-2'-fluoroadenosine-3'-phosphorothioate
  modified_base 3: mod_base = OTHER; note = 2'-O-methylguanosine-3'-phosphate
  modified_base 4: mod_base = OTHER; note = 2'-deoxy-2'-fluoroguanosine-3'-phosphate
  modified_base 5: mod_base = OTHER; note = 2'-O-methyladenosine-3'-phosphate
  modified_base 6: mod_base = OTHER; note = 2'-deoxy-2'-fluoroadenosine-3'-phosphate
  modified_base 7: mod_base = OTHER; note = 2'-O-methylcytidine-3'-phosphate
  modified_base 8: mod_base = OTHER; note = 2'-deoxy-2'-fluorouridine-3'-phosphate
  modified_base 9: mod_base = OTHER; note = 2'-O-methylcytidine-3'-phosphate
  modified_base 10: mod_base = OTHER; note = 2'-deoxy-2'-fluorouridine-3'-phosphate
  modified_base 11: mod_base = OTHER; note = 2'-O-methylcytidine-3'-phosphate
  modified_base 12: mod_base = OTHER; note = 2'-O-methylcytidine-3'-phosphate
  modified_base 13: mod_base = OTHER; note = 2'-O-methyladenosine-3'-phosphate
  modified_base 14: mod_base = OTHER; note = 2'-deoxy-2'-fluoroguanosine-3'-phosphate
  modified_base 15: mod_base = OTHER; note = 2'-O-methylguanosine-3'-phosphate
  modified_base 16: mod_base = OTHER; note = 2'-deoxy-2'-fluoroguanosine-3'-phosphate
  modified_base 17: mod_base = OTHER; note = 2'-O-methylcytidine-3'-phosphate
  modified_base 18: mod_base = OTHER; note = 2'-deoxy-2'-fluoroadenosine-3'-phosphate
  modified_base 19: mod_base = OTHER; note = 2'-O-methylguanosine-3'-phosphate
  modified_base 20: mod_base = OTHER; note = 2'-deoxy-2'-fluoroguanosine-3'-phosphate
  modified_base 21: mod_base = OTHER; note = 2'-O-methylguanosine-3'-phosphorothioate
  modified_base 22: mod_base = OTHER; note = 2'-O-methylguanosine-3'-phosphorothioate
  modified_base 23: mod_base = OTHER; note = 2'-O-methyluridine
taggaactctccagggcaggggt

SEQ ID NO: 478 - RNA, 23 nt, synthetic construct
  source 1..23: mol_type = other RNA
  modified_base 1: mod_base = OTHER; note = 2'-O-methyluridine-3'-phosphorothioate
  modified_base 2: mod_base = OTHER; note = 2'-deoxy-2'-fluorouridine-3'-phosphorothioate
  modified_base 3: mod_base = OTHER; note = 2'-O-methylguanosine-3'-phosphate
  modified_base 4: mod_base = OTHER; note = 2'-deoxy-2'-fluoroguanosine-3'-phosphate
  modified_base 5: mod_base = OTHER; note = 2'-O-methyladenosine-3'-phosphate
  modified_base 6: mod_base = OTHER; note = 2'-deoxy-2'-fluoroguanosine-3'-phosphate
  modified_base 7: mod_base = OTHER; note = 2'-O-methylguanosine-3'-phosphate
  modified_base 8: mod_base = OTHER; note = 2'-deoxy-2'-fluorocytidine-3'-phosphate
  modified_base 9: mod_base = OTHER; note = 2'-O-methylcytidine-3'-phosphate
  modified_base 10: mod_base = OTHER; note = 2'-deoxy-2'-fluoroadenosine-3'-phosphate
  modified_base 11: mod_base = OTHER; note = 2'-O-methylcytidine-3'-phosphate
  modified_base 12: mod_base = OTHER; note = 2'-O-methyladenosine-3'-phosphate
  modified_base 13: mod_base = OTHER; note = 2'-O-methylguanosine-3'-phosphate
  modified_base 14: mod_base = OTHER; note = 2'-deoxy-2'-fluorouridine-3'-phosphate
  modified_base 15: mod_base = OTHER; note = 2'-O-methylcytidine-3'-phosphate
  modified_base 16: mod_base = OTHER; note = 2'-deoxy-2'-fluoroadenosine-3'-phosphate
  modified_base 17: mod_base = OTHER; note = 2'-O-methylcytidine-3'-phosphate
  modified_base 18: mod_base = OTHER; note = 2'-deoxy-2'-fluoroadenosine-3'-phosphate
  modified_base 19: mod_base = OTHER; note = 2'-O-methylguanosine-3'-phosphate
  modified_base 20: mod_base = OTHER; note = 2'-deoxy-2'-fluorouridine-3'-phosphate
  modified_base 21: mod_base = OTHER; note = 2'-O-methylguanosine-3'-phosphorothioate
  modified_base 22: mod_base = OTHER; note = 2'-O-methylcytidine-3'-phosphorothioate
  modified_base 23: mod_base = OTHER; note = 2'-O-methyluridine
ttggaggccacagtcacagtgct

SEQ ID NO: 479 - RNA, 23 nt, synthetic construct
  source 1..23: mol_type = other RNA
  modified_base 1: mod_base = OTHER; note = 2'-O-methyluridine-3'-phosphorothioate
  modified_base 2: mod_base = OTHER; note = 2'-deoxy-2'-fluorocytidine-3'-phosphorothioate
  modified_base 3: mod_base = OTHER; note = 2'-O-methylcytidine-3'-phosphate
  modified_base 4: mod_base = OTHER; note = 2'-deoxy-2'-fluoroadenosine-3'-phosphate
  modified_base 5: mod_base = OTHER; note = 2'-O-methylguanosine-3'-phosphate
  modified_base 6: mod_base = OTHER; note = 2'-deoxy-2'-fluoroguanosine-3'-phosphate
  modified_base 7: mod_base = OTHER; note = 2'-O-methylcytidine-3'-phosphate
  modified_base 8: mod_base = OTHER; note = 2'-deoxy-2'-fluorocytidine-3'-phosphate
  modified_base 9: mod_base = OTHER; note = 2'-O-methylguanosine-3'-phosphate
  modified_base 10: mod_base = OTHER; note = 2'-deoxy-2'-fluorouridine-3'-phosphate
  modified_base 11: mod_base = OTHER; note = 2'-O-methyluridine-3'-phosphate
  modified_base 12: mod_base = OTHER; note = 2'-O-methylguanosine-3'-phosphate
  modified_base 13: mod_base = OTHER; note = 2'-O-methylguanosine-3'-phosphate
  modified_base 14: mod_base = OTHER; note = 2'-deoxy-2'-fluoroguanosine-3'-phosphate
  modified_base 15: mod_base = OTHER; note = 2'-O-methylguanosine-3'-phosphate
  modified_base 16: mod_base = OTHER; note = 2'-deoxy-2'-fluorocytidine-3'-phosphate
  modified_base 17: mod_base = OTHER; note = 2'-O-methyladenosine-3'-phosphate
  modified_base 18: mod_base = OTHER; note = 2'-deoxy-2'-fluoroguanosine-3'-phosphate
  modified_base 19: mod_base = OTHER; note = 2'-O-methyluridine-3'-phosphate
  modified_base 20: mod_base = OTHER; note = 2'-deoxy-2'-fluorocytidine-3'-phosphate
  modified_base 21: mod_base = OTHER; note = 2'-O-methylcytidine-3'-phosphorothioate
  modified_base 22: mod_base = OTHER; note = 2'-O-methyluridine-3'-phosphorothioate
  modified_base 23: mod_base = OTHER; note = 2'-O-methyluridine
tccaggccgttggggcagtcctt

SEQ ID NO: 480 - RNA, 23 nt, synthetic construct
  source 1..23: mol_type = other RNA
  modified_base 1: mod_base = OTHER; note = 2'-O-methyluridine-3'-phosphorothioate
  modified_base 2: mod_base = OTHER; note = 2'-deoxy-2'-fluorocytidine-3'-phosphorothioate
  modified_base 3: mod_base = OTHER; note = 2'-O-methyluridine-3'-phosphate
  modified_base 4: mod_base = OTHER; note = 2'-deoxy-2'-fluorouridine-3'-phosphate
  modified_base 5: mod_base = OTHER; note = 2'-O-methylguanosine-3'-phosphate
  modified_base 6: mod_base = OTHER; note = 2'-deoxy-2'-fluorouridine-3'-phosphate
  modified_base 7: mod_base = OTHER; note = 2'-O-methyladenosine-3'-phosphate
  modified_base 8: mod_base = OTHER; note = 2'-deoxy-2'-fluorocytidine-3'-phosphate
  modified_base 9: mod_base = OTHER; note = 2'-O-methylcytidine-3'-phosphate
  modified_base 10: mod_base = OTHER; note = 2'-deoxy-2'-fluorocytidine-3'-phosphate
  modified_base 11: mod_base = OTHER; note = 2'-O-methyluridine-3'-phosphate
  modified_base 12: mod_base = OTHER; note = 2'-O-methyladenosine-3'-phosphate
  modified_base 13: mod_base = OTHER; note = 2'-O-methylguanosine-3'-phosphate
  modified_base 14: mod_base = OTHER; note = 2'-deoxy-2'-fluoroguanosine-3'-phosphate
  modified_base 15: mod_base = OTHER; note = 2'-O-methyladenosine-3'-phosphate
  modified_base 16: mod_base = OTHER; note = 2'-deoxy-2'-fluoroadenosine-3'-phosphate
  modified_base 17: mod_base = OTHER; note = 2'-O-methyladenosine-3'-phosphate
  modified_base 18: mod_base = OTHER; note = 2'-deoxy-2'-fluorouridine-3'-phosphate
  modified_base 19: mod_base = OTHER; note = 2'-O-methyladenosine-3'-phosphate
  modified_base 20: mod_base = OTHER; note = 2'-deoxy-2'-fluorocytidine-3'-phosphate
  modified_base 21: mod_base = OTHER; note = 2'-O-methylcytidine-3'-phosphorothioate
  modified_base 22: mod_base = OTHER; note = 2'-O-methyladenosine-3'-phosphorothioate
  modified_base 23: mod_base = OTHER; note = 2'-O-methylguanosine
tcttgtaccctaggaaataccag

SEQ ID NO: 481 - RNA, 23 nt, synthetic construct
  source 1..23: mol_type = other RNA
  modified_base 1: mod_base = OTHER; note = 2'-O-methyluridine-3'-phosphorothioate
  modified_base 2: mod_base = OTHER; note = 2'-deoxy-2'-fluorouridine-3'-phosphorothioate
  modified_base 3: mod_base = OTHER; note = 2'-O-methylguanosine-3'-phosphate
  modified_base 4: mod_base = OTHER; note = 2'-deoxy-2'-fluoroadenosine-3'-phosphate
  modified_base 5: mod_base = OTHER; note = 2'-O-methylguanosine-3'-phosphate
  modified_base 6: mod_base = OTHER; note = 2'-deoxy-2'-fluoroguanosine-3'-phosphate
  modified_base 7: mod_base = OTHER; note = 2'-O-methylguanosine-3'-phosphate
  modified_base 8: mod_base = OTHER; note = 2'-deoxy-2'-fluoroadenosine-3'-phosphate
  modified_base 9: mod_base = OTHER; note = 2'-O-methylguanosine-3'-phosphate
  modified_base 10: mod_base = OTHER; note = 2'-deoxy-2'-fluoroadenosine-3'-phosphate
  modified_base 11: mod_base = OTHER; note = 2'-O-methyluridine-3'-phosphate
  modified_base 12: mod_base = OTHER; note = 2'-O-methylcytidine-3'-phosphate
  modified_base 13: mod_base = OTHER; note = 2'-O-methyluridine-3'-phosphate
  modified_base 14: mod_base = OTHER; note = 2'-deoxy-2'-fluoroguanosine-3'-phosphate
  modified_base 15: mod_base = OTHER; note = 2'-O-methylguanosine-3'-phosphate
  modified_base 16: mod_base = OTHER; note = 2'-deoxy-2'-fluoroguanosine-3'-phosphate
  modified_base 17: mod_base = OTHER; note = 2'-O-methyladenosine-3'-phosphate
  modified_base 18: mod_base = OTHER; note = 2'-deoxy-2'-fluoroguanosine-3'-phosphate
  modified_base 19: mod_base = OTHER; note = 2'-O-methylguanosine-3'-phosphate
  modified_base 20: mod_base = OTHER; note = 2'-deoxy-2'-fluorouridine-3'-phosphate
  modified_base 21: mod_base = OTHER; note = 2'-O-methylguanosine-3'-phosphorothioate
  modified_base 22: mod_base = OTHER; note = 2'-O-methyladenosine-3'-phosphorothioate
  modified_base 23: mod_base = OTHER; note = 2'-O-methyladenosine
ttgagggagatctgggaggtgaa

SEQ ID NO: 482 - RNA, 23 nt, synthetic construct
  source 1..23: mol_type = other RNA
  modified_base 1: mod_base = OTHER; note = 2'-O-methyluridine-3'-phosphorothioate
  modified_base 2: mod_base = OTHER; note = 2'-deoxy-2'-fluorouridine-3'-phosphorothioate
  modified_base 3: mod_base = OTHER; note = 2'-O-methyluridine-3'-phosphate
  modified_base 4: mod_base = OTHER; note = 2'-deoxy-2'-fluoroguanosine-3'-phosphate
  modified_base 5: mod_base = OTHER; note = 2'-O-methyluridine-3'-phosphate
  modified_base 6: mod_base = OTHER; note = 2'-deoxy-2'-fluoroadenosine-3'-phosphate
  modified_base 7: mod_base = OTHER; note = 2'-O-methylcytidine-3'-phosphate
  modified_base 8: mod_base = OTHER; note = 2'-deoxy-2'-fluorocytidine-3'-phosphate
  modified_base 9: mod_base = OTHER; note = 2'-O-methylcytidine-3'-phosphate
  modified_base 10: mod_base = OTHER; note = 2'-deoxy-2'-fluorouridine-3'-phosphate
  modified_base 11: mod_base = OTHER; note = 2'-O-methyladenosine-3'-phosphate
  modified_base 12: mod_base = OTHER; note = 2'-O-methylguanosine-3'-phosphate
  modified_base 13: mod_base = OTHER; note = 2'-O-methylguanosine-3'-phosphate
  modified_base 14: mod_base = OTHER; note = 2'-deoxy-2'-fluoroadenosine-3'-phosphate
  modified_base 15: mod_base = OTHER; note = 2'-O-methyladenosine-3'-phosphate
  modified_base 16: mod_base = OTHER; note = 2'-deoxy-2'-fluoroadenosine-3'-phosphate
  modified_base 17: mod_base = OTHER; note = 2'-O-methyluridine-3'-phosphate
  modified_base 18: mod_base = OTHER; note = 2'-deoxy-2'-fluoroadenosine-3'-phosphate
  modified_base 19: mod_base = OTHER; note = 2'-O-methylcytidine-3'-phosphate
  modified_base 20: mod_base = OTHER; note = 2'-deoxy-2'-fluorocytidine-3'-phosphate
  modified_base 21: mod_base = OTHER; note = 2'-O-methyladenosine-3'-phosphorothioate
  modified_base 22: mod_base = OTHER; note = 2'-O-methylguanosine-3'-phosphorothioate
  modified_base 23: mod_base = OTHER; note = 2'-O-methyladenosine
tttgtaccctaggaaataccaga

SEQ ID NO: 483 - RNA, 23 nt, synthetic construct
  source 1..23: mol_type = other RNA
  modified_base 1: mod_base = OTHER; note = 2'-O-methyluridine-3'-phosphorothioate
  modified_base 2: mod_base = OTHER; note = 2'-deoxy-2'-fluorocytidine-3'-phosphorothioate
  modified_base 3: mod_base = OTHER; note = 2'-O-methylcytidine-3'-phosphate
  modified_base 4: mod_base = OTHER; note = 2'-deoxy-2'-fluorouridine-3'-phosphate
  modified_base 5: mod_base = OTHER; note = 2'-O-methyluridine-3'-phosphate
  modified_base 6: mod_base = OTHER; note = 2'-deoxy-2'-fluoroguanosine-3'-phosphate
  modified_base 7: mod_base = OTHER; note = 2'-O-methyluridine-3'-phosphate
  modified_base 8: mod_base = OTHER; note = 2'-deoxy-2'-fluoroadenosine-3'-phosphate
  modified_base 9: mod_base = OTHER; note = 2'-O-methylcytidine-3'-phosphate
  modified_base 10: mod_base = OTHER; note = 2'-deoxy-2'-fluorocytidine-3'-phosphate
  modified_base 11: mod_base = OTHER; note = 2'-O-methylcytidine-3'-phosphate
  modified_base 12: mod_base = OTHER; note = 2'-O-methyluridine-3'-phosphate
  modified_base 13: mod_base = OTHER; note = 2'-O-methyladenosine-3'-phosphate
  modified_base 14: mod_base = OTHER; note = 2'-deoxy-2'-fluoroguanosine-3'-phosphate
  modified_base 15: mod_base = OTHER; note = 2'-O-methylguanosine-3'-phosphate
  modified_base 16: mod_base = OTHER; note = 2'-deoxy-2'-fluoroadenosine-3'-phosphate
  modified_base 17: mod_base = OTHER; note = 2'-O-methyladenosine-3'-phosphate
  modified_base 18: mod_base = OTHER; note = 2'-deoxy-2'-fluoroadenosine-3'-phosphate
  modified_base 19: mod_base = OTHER; note = 2'-O-methyluridine-3'-phosphate
  modified_base 20: mod_base = OTHER; note = 2'-deoxy-2'-fluoroadenosine-3'-phosphate
  modified_base 21: mod_base = OTHER; note = 2'-O-methylcytidine-3'-phosphorothioate
  modified_base 22: mod_base = OTHER; note = 2'-O-methylcytidine-3'-phosphorothioate
  modified_base 23: mod_base = OTHER; note = 2'-O-methyladenosine
tccttgtaccctaggaaatacca

SEQ ID NO: 484 - RNA, 23 nt, synthetic construct
  source 1..23: mol_type = other RNA
  modified_base 1: mod_base = OTHER; note = 2'-O-methyluridine-3'-phosphorothioate
  modified_base 2: mod_base = OTHER; note = 2'-deoxy-2'-fluoroadenosine-3'-phosphorothioate
  modified_base 3: mod_base = OTHER; note = 2'-O-methyluridine-3'-phosphate
  modified_base 4: mod_base = OTHER; note = 2'-deoxy-2'-fluoroguanosine-3'-phosphate
  modified_base 5: mod_base = OTHER; note = 2'-O-methylguanosine-3'-phosphate
  modified_base 6: mod_base = OTHER; note = 2'-deoxy-2'-fluorocytidine-3'-phosphate
  modified_base 7: mod_base = OTHER; note = 2'-O-methylcytidine-3'-phosphate
  modified_base 8: mod_base = OTHER; note = 2'-deoxy-2'-fluoroadenosine-3'-phosphate
  modified_base 9: mod_base = OTHER; note = 2'-O-methylcytidine-3'-phosphate
  modified_base 10: mod_base = OTHER; note = 2'-deoxy-2'-fluorouridine-3'-phosphate
  modified_base 11: mod_base = OTHER; note = 2'-O-methylcytidine-3'-phosphate
  modified_base 12: mod_base = OTHER; note = 2'-O-methyladenosine-3'-phosphate
  modified_base 13: mod_base = OTHER; note = 2'-O-methylcytidine-3'-phosphate
  modified_base 14: mod_base = OTHER; note = 2'-deoxy-2'-fluorocytidine-3'-phosphate
  modified_base 15: mod_base = OTHER; note = 2'-O-methylcytidine-3'-phosphate
  modified_base 16: mod_base = OTHER; note = 2'-deoxy-2'-fluorouridine-3'-phosphate
  modified_base 17: mod_base = OTHER; note = 2'-O-methylcytidine-3'-phosphate
  modified_base 18: mod_base = OTHER; note = 2'-deoxy-2'-fluoroguanosine-3'-phosphate
  modified_base 19: mod_base = OTHER; note = 2'-O-methylguanosine-3'-phosphate
  modified_base 20: mod_base = OTHER; note = 2'-deoxy-2'-fluoroadenosine-3'-phosphate
  modified_base 21: mod_base = OTHER; note = 2'-O-methylguanosine-3'-phosphorothioate
  modified_base 22: mod_base = OTHER; note = 2'-O-methylguanosine-3'-phosphorothioate
  modified_base 23: mod_base = OTHER; note = 2'-O-methyladenosine
tatggccactcaccctcggagga

SEQ ID NO: 485 - RNA, 23 nt, synthetic construct
  source 1..23: mol_type = other RNA
  modified_base 1: mod_base = OTHER; note = 2'-O-methyluridine-3'-phosphorothioate
  modified_base 2: mod_base = OTHER; note = 2'-deoxy-2'-fluorouridine-3'-phosphorothioate
  modified_base 3: mod_base = OTHER; note = 2'-O-methylcytidine-3'-phosphate
  modified_base 4: mod_base = OTHER; note = 2'-deoxy-2'-fluoroadenosine-3'-phosphate
  modified_base 5: mod_base = OTHER; note = 2'-O-methyluridine-3'-phosphate
  modified_base 6: mod_base = OTHER; note = 2'-deoxy-2'-fluorocytidine-3'-phosphate
  modified_base 7: mod_base = OTHER; note = 2'-O-methylcytidine-3'-phosphate
  modified_base 8: mod_base = OTHER; note = 2'-deoxy-2'-fluoroadenosine-3'-phosphate
  modified_base 9: mod_base = OTHER; note = 2'-O-methylguanosine-3'-phosphate
  modified_base 10: mod_base = OTHER; note = 2'-deoxy-2'-fluoroguanosine-3'-phosphate
  modified_base 11: mod_base = OTHER; note = 2'-O-methylcytidine-3'-phosphate
  modified_base 12: mod_base = OTHER; note = 2'-O-methylcytidine-3'-phosphate
  modified_base 13: mod_base = OTHER; note = 2'-O-methylguanosine-3'-phosphate
  modified_base 14: mod_base = OTHER; note = 2'-deoxy-2'-fluorouridine-3'-phosphate
  modified_base 15: mod_base = OTHER; note = 2'-O-methyluridine-3'-phosphate
  modified_base 16: mod_base = OTHER; note = 2'-deoxy-2'-fluoroguanosine-3'-phosphate
  modified_base 17: mod_base = OTHER; note = 2'-O-methylguanosine-3'-phosphate
  modified_base 18: mod_base = OTHER; note = 2'-deoxy-2'-fluoroguanosine-3'-phosphate
  modified_base 19: mod_base = OTHER; note = 2'-O-methylguanosine-3'-phosphate
  modified_base 20: mod_base = OTHER; note = 2'-deoxy-2'-fluorocytidine-3'-phosphate
  modified_base 21: mod_base = OTHER; note = 2'-O-methyladenosine-3'-phosphorothioate
  modified_base 22: mod_base = OTHER; note = 2'-O-methylguanosine-3'-phosphorothioate
  modified_base 23: mod_base = OTHER; note = 2'-O-methyluridine
ttcatccaggccgttggggcagt

SEQ ID NO: 486 - RNA, 23 nt, synthetic construct
  source 1..23: mol_type = other RNA
  modified_base 1: mod_base = OTHER; note = 2'-O-methyladenosine-3'-phosphorothioate
  modified_base 2: mod_base = OTHER; note = 2'-deoxy-2'-fluoroguanosine-3'-phosphorothioate
  modified_base 3: mod_base = OTHER; note = 2'-O-methyladenosine-3'-phosphate
  modified_base 4: mod_base = OTHER; note = 2'-deoxy-2'-fluoroguanosine-3'-phosphate
  modified_base 5: mod_base = OTHER; note = 2'-O-methylguanosine-3'-phosphate
  modified_base 6: mod_base = OTHER; note = 2'-deoxy-2'-fluoroadenosine-3'-phosphate
  modified_base 7: mod_base = OTHER; note = 2'-O-methyladenosine-3'-phosphate
  modified_base 8: mod_base = OTHER; note = 2'-deoxy-2'-fluorocytidine-3'-phosphate
  modified_base 9: mod_base = OTHER; note = 2'-O-methyluridine-3'-phosphate
  modified_base 10: mod_base = OTHER; note = 2'-deoxy-2'-fluorocytidine-3'-phosphate
  modified_base 11: mod_base = OTHER; note = 2'-O-methyluridine-3'-phosphate
  modified_base 12: mod_base = OTHER; note = 2'-O-methylcytidine-3'-phosphate
  modified_base 13: mod_base = OTHER; note = 2'-O-methylcytidine-3'-phosphate
  modified_base 14: mod_base = OTHER; note = 2'-deoxy-2'-fluoroadenosine-3'-phosphate
  modified_base 15: mod_base = OTHER; note = 2'-O-methylguanosine-3'-phosphate
  modified_base 16: mod_base = OTHER; note = 2'-deoxy-2'-fluoroguanosine-3'-phosphate
  modified_base 17: mod_base = OTHER; note = 2'-O-methylguanosine-3'-phosphate
  modified_base 18: mod_base = OTHER; note = 2'-deoxy-2'-fluorocytidine-3'-phosphate
  modified_base 19: mod_base = OTHER; note = 2'-O-methyladenosine-3'-phosphate
  modified_base 20: mod_base = OTHER; note = 2'-deoxy-2'-fluoroguanosine-3'-phosphate
  modified_base 21: mod_base = OTHER; note = 2'-O-methylguanosine-3'-phosphorothioate
  modified_base 22: mod_base = OTHER; note = 2'-O-methylguanosine-3'-phosphorothioate
  modified_base 23: mod_base = OTHER; note = 2'-O-methylguanosine
agaggaactctccagggcagggg

SEQ ID NO: 487 - RNA, 21 nt, synthetic construct
  source 1..21: mol_type = other RNA
  modified_base 1: mod_base = OTHER; note = 2'-deoxy-2'-fluorocytidine-3'-phosphorothioate
  modified_base 2: mod_base = OTHER; note = 2'-O-methyluridine-3'-phosphorothioate
  modified_base 3: mod_base = OTHER; note = 2'-deoxy-2'-fluoroguanosine-3'-phosphate
  modified_base 4: mod_base = OTHER; note = 2'-O-methylguanosine-3'-phosphate
  modified_base 5: mod_base = OTHER; note = 2'-deoxy-2'-fluorouridine-3'-phosphate
  modified_base 6: mod_base = OTHER; note = 2'-O-methyladenosine-3'-phosphate
  modified_base 7: mod_base = OTHER; note = 2'-deoxy-2'-fluorouridine-3'-phosphate
  modified_base 8: mod_base = OTHER; note = 2'-O-methyluridine-3'-phosphate
  modified_base 9: mod_base = OTHER; note = 2'-deoxy-2'-fluorouridine-3'-phosphate
  modified_base 10: mod_base = OTHER; note = 2'-deoxy-2'-fluorocytidine-3'-phosphate
  modified_base 11: mod_base = OTHER; note = 2'-deoxy-2'-fluorocytidine-3'-phosphate
  modified_base 12: mod_base = OTHER; note = 2'-O-methyluridine-3'-phosphate
  modified_base 13: mod_base = OTHER; note = 2'-deoxy-2'-fluoroadenosine-3'-phosphate
  modified_base 14: mod_base = OTHER; note = 2'-O-methylguanosine-3'-phosphate
  modified_base 15: mod_base = OTHER; note = 2'-deoxy-2'-fluoroguanosine-3'-phosphate
  modified_base 16: mod_base = OTHER; note = 2'-O-methylguanosine-3'-phosphate
  modified_base 17: mod_base = OTHER; note = 2'-deoxy-2'-fluorouridine-3'-phosphate
  modified_base 18: mod_base = OTHER; note = 2'-O-methyladenosine-3'-phosphate
  modified_base 19: mod_base = OTHER; note = 2'-deoxy-2'-fluorocytidine-3'-phosphate
  modified_base 20: mod_base = OTHER; note = 2'-O-methyladenosine-3'-phosphate
  modified_base 21: mod_base = OTHER; note = 2'-deoxy-2'-fluoroadenosine-3'-phosphate ((2S,4R)-1-[29-[[2-(acetylamino)-2-deoxy-beta-D-galactopyra nosyl]oxy]-14,14-bis[[3-[[3-[[5-[[2-(acetylamino)-2-deoxy-b eta-D-galactopyranosyl]oxy]-1-oxopentyl]amino]propyl]amino] -3-oxopropoxy]methyl]-1,12,19,25-tetraoxo-16-oxa-13,20,24-t riazanonacos-1-yl]-4-hydroxy-2-pyrrolidinyl)methyl ester
ctggtatttcctagggtacaa

SEQ ID NO: 488 - RNA, 21 nt, synthetic construct
  source 1..21: mol_type = other RNA
  modified_base 1: mod_base = OTHER; note = 2'-deoxy-2'-fluorocytidine-3'-phosphorothioate
  modified_base 2: mod_base = OTHER; note = 2'-O-methyluridine-3'-phosphorothioate
  modified_base 3: mod_base = OTHER; note = 2'-deoxy-2'-fluoroguanosine-3'-phosphate
  modified_base 4: mod_base = OTHER; note = 2'-O-methylguanosine-3'-phosphate
  modified_base 5: mod_base = OTHER; note = 2'-deoxy-2'-fluorouridine-3'-phosphate
  modified_base 6: mod_base = OTHER; note = 2'-O-methyladenosine-3'-phosphate
  modified_base 7: mod_base = OTHER; note = 2'-deoxy-2'-fluorouridine-3'-phosphate
  modified_base 8: mod_base = OTHER; note = 2'-O-methyluridine-3'-phosphate
  modified_base 9: mod_base = OTHER; note = 2'-deoxy-2'-fluorouridine-3'-phosphate
  modified_base 10: mod_base = OTHER; note = 2'-deoxy-2'-fluorocytidine-3'-phosphate
  modified_base 11: mod_base = OTHER; note = 2'-deoxy-2'-fluorocytidine-3'-phosphate
  modified_base 12: mod_base = OTHER; note = 2'-O-methyluridine-3'-phosphate
  modified_base 13: mod_base = OTHER; note = 2'-deoxy-2'-fluoroadenosine-3'-phosphate
  modified_base 14: mod_base = OTHER; note = 2'-O-methylguanosine-3'-phosphate
  modified_base 15: mod_base = OTHER; note = 2'-deoxy-2'-fluoroguanosine-3'-phosphate
  modified_base 16: mod_base = OTHER; note = 2'-O-methylguanosine-3'-phosphate
  modified_base 17: mod_base = OTHER; note = 2'-deoxy-2'-fluorouridine-3'-phosphate
  modified_base 18: mod_base = OTHER; note = 2'-O-methyladenosine-3'-phosphate
  modified_base 19: mod_base = OTHER; note = 2'-deoxy-2'-fluorocytidine-3'-phosphate
  modified_base 20: mod_base = OTHER; note = 2'-O-methyladenosine-3'-phosphate
  modified_base 21: mod_base = OTHER; note = 2'-deoxy-2'-fluoroadenosine-3'-phosphate ((2S,4R)-1-[29-[[2-(acetylamino)-2-deoxy-beta-D-galactopyra nosyl]oxy]-14,14-bis[[3-[[3-[[5-[[2-(acetylamino)-2-deoxy-b eta-D-galactopyranosyl]oxy]-1-oxopentyl]amino]propyl]amino] -3-oxopropoxy]methyl]-1,12,19,25-tetraoxo-16-oxa-13,20,24-t riazanonacos-1-yl]-4-hydroxy-2-pyrrolidinyl)methyl ester
ctggtatttcctagggtacaa

SEQ ID NO: 489 - DNA, 21 bp, synthetic construct
  source 1..21: mol_type = other DNA
  modified_base 1: mod_base = OTHER; note = 2'-O-methylcytidine-3'-phosphorothioate
  modified_base 2: mod_base = OTHER; note = 2'-O-methyluridine-3'-phosphorothioate
  modified_base 3: mod_base = OTHER; note = 2'-O-methylguanosine-3'-phosphate
  modified_base 4: mod_base = OTHER; note = 2'-O-methylguanosine-3'-phosphate
  modified_base 5: mod_base = OTHER; note = 2'-O-methyluridine-3'-phosphate
  modified_base 6: mod_base = OTHER; note = 2'-O-methyladenosine-3'-phosphate
  modified_base 7: mod_base = OTHER; note = 2'-deoxy-2'-fluorouridine-3'-phosphate
  modified_base 8: mod_base = OTHER; note = 2'-O-methyluridine-3'-phosphate
  modified_base 9: mod_base = OTHER; note = 2'-deoxy-2'-fluorouridine-3'-phosphate
  modified_base 10: mod_base = OTHER; note = 2'-deoxy-2'-fluorocytidine-3'-phosphate
  modified_base 11: mod_base = OTHER; note = 2'-deoxy-2'-fluorocytidine-3'-phosphate
  modified_base 12: mod_base = OTHER; note = 2'-O-methyluridine-3'-phosphate
  modified_base 13: mod_base = OTHER; note = 2'-O-methyladenosine-3'-phosphate
  modified_base 14: mod_base = OTHER; note = 2'-O-methylguanosine-3'-phosphate
  modified_base 15: mod_base = OTHER; note = 2'-O-methylguanosine-3'-phosphate
  modified_base 16: mod_base = OTHER; note = 2'-deoxy-2'-fluoroguanosine-3'-phosphate
  modified_base 18: mod_base = OTHER; note = 2'-O-methyladenosine-3'-phosphate
  modified_base 19: mod_base = OTHER; note = 2'-O-methylcytidine-3'-phosphate
  modified_base 20: mod_base = OTHER; note = 2'-O-methyladenosine-3'-phosphate
  modified_base 21: mod_base = OTHER; note = 2'-O-methyladenosine-3'-phosphate ((2S,4R)-1-[29-[[2-(acetylamino)-2-deoxy-beta-D-galactopyra nosyl]oxy]-14,14-bis[[3-[[3-[[5-[[2-(acetylamino)-2-deoxy-b eta-D-galactopyranosyl]oxy]-1-oxopentyl]amino]propyl]amino] -3-oxopropoxy]methyl]-1,12,19,25-tetraoxo-16-oxa-13,20,24-t riazanonacos-1-yl]-4-hydroxy-2-pyrrolidinyl)methyl ester
  misc_feature 1..16: note = RNA
  misc_feature 18..21: note = RNA
  misc_feature 17: note = DNA
ctggtatttcctagggtacaa

SEQ ID NO: 490 - RNA, 21 nt, synthetic construct
  source 1..21: mol_type = other RNA
  modified_base 1: mod_base = OTHER; note = 2'-deoxy-2'-fluorocytidine-3'-phosphorothioate
  modified_base 2: mod_base = OTHER; note = 2'-O-methyluridine-3'-phosphorothioate
  modified_base 3: mod_base = OTHER; note = 2'-deoxy-2'-fluoroguanosine-3'-phosphate
  modified_base 4: mod_base = OTHER; note = 2'-O-methylguanosine-3'-phosphate
  modified_base 5: mod_base = OTHER; note = 2'-deoxy-2'-fluorouridine-3'-phosphate
  modified_base 6: mod_base = OTHER; note = 2'-O-methyladenosine-3'-phosphate
  modified_base 7: mod_base = OTHER; note = 2'-deoxy-2'-fluorouridine-3'-phosphate
  modified_base 8: mod_base = OTHER; note = 2'-O-methyluridine-3'-phosphate
  modified_base 9: mod_base = OTHER; note = 2'-deoxy-2'-fluorouridine-3'-phosphate
  modified_base 10: mod_base = OTHER; note = 2'-deoxy-2'-fluorocytidine-3'-phosphate
  modified_base 11: mod_base = OTHER; note = 2'-deoxy-2'-fluorocytidine-3'-phosphate
  modified_base 12: mod_base = OTHER; note = 2'-O-methyluridine-3'-phosphate
  modified_base 13: mod_base = OTHER; note = 2'-deoxy-2'-fluoroadenosine-3'-phosphate
  modified_base 14: mod_base = OTHER; note = 2'-O-methylguanosine-3'-phosphate
  modified_base 15: mod_base = OTHER; note = 2'-deoxy-2'-fluoroguanosine-3'-phosphate
  modified_base 16: mod_base = OTHER; note = 2'-O-methylguanosine-3'-phosphate
  modified_base 17: mod_base = OTHER; note = 2'-deoxy-2'-fluorouridine-3'-phosphate
  modified_base 18: mod_base = OTHER; note = 2'-O-methyladenosine-3'-phosphate
  modified_base 19: mod_base = OTHER; note = 2'-deoxy-2'-fluorocytidine-3'-phosphate
  modified_base 20: mod_base = OTHER; note = 2'-O-methyladenosine-3'-phosphate
  modified_base 21: mod_base = OTHER; note = 2'-deoxy-2'-fluoroadenosine-3'-phosphate ((2S,4R)-1-[29-[[2-(acetylamino)-2-deoxy-beta-D-galactopyra nosyl]oxy]-14,14-bis[[3-[[3-[[5-[[2-(acetylamino)-2-deoxy-b eta-D-galactopyranosyl]oxy]-1-oxopentyl]amino]propyl]amino] -3-oxopropoxy]methyl]-1,12,19,25-tetraoxo-16-oxa-13,20,24-t riazanonacos-1-yl]-4-hydroxy-2-pyrrolidinyl)methyl ester
ctggtatttcctagggtacaa

SEQ ID NO: 491 - RNA, 21 nt, synthetic construct
  source 1..21: mol_type = other RNA
  modified_base 1: mod_base = OTHER; note = 2'-deoxy-2'-fluorocytidine-3'-phosphorothioate
  modified_base 2: mod_base = OTHER; note = 2'-O-methyluridine-3'-phosphorothioate
  modified_base 3: mod_base = OTHER; note = 2'-deoxy-2'-fluoroguanosine-3'-phosphate
  modified_base 4: mod_base = OTHER; note = 2'-O-methylguanosine-3'-phosphate
  modified_base 5: mod_base = OTHER; note = 2'-deoxy-2'-fluorouridine-3'-phosphate
  modified_base 6: mod_base = OTHER; note = 2'-O-methyladenosine-3'-phosphate
  modified_base 7: mod_base = OTHER; note = 2'-deoxy-2'-fluorouridine-3'-phosphate
  modified_base 8: mod_base = OTHER; note = 2'-O-methyluridine-3'-phosphate
  modified_base 9: mod_base = OTHER; note = 2'-deoxy-2'-fluorouridine-3'-phosphate
  modified_base 10: mod_base = OTHER; note = 2'-deoxy-2'-fluorocytidine-3'-phosphate
  modified_base 11: mod_base = OTHER; note = 2'-deoxy-2'-fluorocytidine-3'-phosphate
  modified_base 12: mod_base = OTHER; note = 2'-O-methyluridine-3'-phosphate
  modified_base 13: mod_base = OTHER; note = 2'-deoxy-2'-fluoroadenosine-3'-phosphate
  modified_base 14: mod_base = OTHER; note = 2'-O-methylguanosine-3'-phosphate
  modified_base 15: mod_base = OTHER; note = 2'-deoxy-2'-fluoroguanosine-3'-phosphate
  modified_base 16: mod_base = OTHER; note = 2'-O-methylguanosine-3'-phosphate
  modified_base 17: mod_base = OTHER; note = 2'-deoxy-2'-fluorouridine-3'-phosphate
  modified_base 18: mod_base = OTHER; note = 2'-O-methyladenosine-3'-phosphate
  modified_base 19: mod_base = OTHER; note = 2'-deoxy-2'-fluorocytidine-3'-phosphate
  modified_base 20: mod_base = OTHER; note = 2'-O-methyladenosine-3'-phosphate
  modified_base 21: mod_base = OTHER; note = 2'-deoxy-2'-fluoroadenosine-3'-phosphate ((2S,4R)-1-[29-[[2-(acetylamino)-2-deoxy-beta-D-galactopyra nosyl]oxy]-14,14-bis[[3-[[3-[[5-[[2-(acetylamino)-2-deoxy-b eta-D-galactopyranosyl]oxy]-1-oxopentyl]amino]propyl]amino] -3-oxopropoxy]methyl]-1,12,19,25-tetraoxo-16-oxa-13,20,24-t riazanonacos-1-yl]-4-hydroxy-2-pyrrolidinyl)methyl ester
ctggtatttcctagggtacaa

SEQ ID NO: 492 - RNA, 21 nt, synthetic construct
  source 1..21: mol_type = other RNA
  modified_base 1: mod_base = OTHER; note = 2'-deoxy-2'-fluorocytidine-3'-phosphorothioate
  modified_base 2: mod_base = OTHER; note = 2'-O-methyluridine-3'-phosphorothioate
  modified_base 3: mod_base = OTHER; note = 2'-deoxy-2'-fluoroguanosine-3'-phosphate
  modified_base 4: mod_base = OTHER; note = 2'-O-methylguanosine-3'-phosphate
  modified_base 5: mod_base = OTHER; note = 2'-deoxy-2'-fluorouridine-3'-phosphate
  modified_base 6: mod_base = OTHER; note = 2'-O-methyladenosine-3'-phosphate
  modified_base 7: mod_base = OTHER; note = 2'-deoxy-2'-fluorouridine-3'-phosphate
  modified_base 8: mod_base = OTHER; note = 2'-O-methyluridine-3'-phosphate
  modified_base 9: mod_base = OTHER; note = 2'-deoxy-2'-fluorouridine-3'-phosphate
  modified_base 10: mod_base = OTHER; note = 2'-deoxy-2'-fluorocytidine-3'-phosphate
  modified_base 11: mod_base = OTHER; note = 2'-deoxy-2'-fluorocytidine-3'-phosphate
  modified_base 12: mod_base = OTHER; note = 2'-O-methyluridine-3'-phosphate
  modified_base 13: mod_base = OTHER; note = 2'-deoxy-2'-fluoroadenosine-3'-phosphate
  modified_base 14: mod_base = OTHER; note = 2'-O-methylguanosine-3'-phosphate
  modified_base 15: mod_base = OTHER; note = 2'-deoxy-2'-fluoroguanosine-3'-phosphate
  modified_base 16: mod_base = OTHER; note = 2'-O-methylguanosine-3'-phosphate
  modified_base 17: mod_base = OTHER; note = 2'-deoxy-2'-fluorouridine-3'-phosphate
  modified_base 18: mod_base = OTHER; note = 2'-O-methyladenosine-3'-phosphate
  modified_base 19: mod_base = OTHER; note = 2'-deoxy-2'-fluorocytidine-3'-phosphate
  modified_base 20: mod_base = OTHER; note = 2'-O-methyladenosine-3'-phosphate
  modified_base 21: mod_base = OTHER; note = 2'-deoxy-2'-fluoroadenosine-3'-phosphate ((2S,4R)-1-[29-[[2-(acetylamino)-2-deoxy-beta-D-galactopyra nosyl]oxy]-14,14-bis[[3-[[3-[[5-[[2-(acetylamino)-2-deoxy-b eta-D-galactopyranosyl]oxy]-1-oxopentyl]amino]propyl]amino] -3-oxopropoxy]methyl]-1,12,19,25-tetraoxo-16-oxa-13,20,24-t riazanonacos-1-yl]-4-hydroxy-2-pyrrolidinyl)methyl ester
ctggtatttcctagggtacaa

SEQ ID NO: 493 - RNA, 19 nt, synthetic construct
  source 1..19: mol_type = other RNA
  modified_base 1: mod_base = OTHER; note = 2'-O-methylguanosine-3'-phosphorothioate
  modified_base 2: mod_base = OTHER; note = 2'-O-methylguanosine-3'-phosphorothioate
  modified_base 3: mod_base = OTHER; note = 2'-deoxy-2'-fluorouridine-3'-phosphate
  modified_base 4: mod_base = OTHER; note = 2'-O-methyladenosine-3'-phosphate
  modified_base 5: mod_base = OTHER; note = 2'-deoxy-2'-fluorouridine-3'-phosphate
  modified_base 6: mod_base = OTHER; note = 2'-O-methyluridine-3'-phosphate
  modified_base 7: mod_base = OTHER; note = 2'-deoxy-2'-fluorouridine-3'-phosphate
  modified_base 8: mod_base = OTHER; note = 2'-deoxy-2'-fluorocytidine-3'-phosphate
  modified_base 9: mod_base = OTHER; note = 2'-deoxy-2'-fluorocytidine-3'-phosphate
  modified_base 10: mod_base = OTHER; note = 2'-O-methyluridine-3'-phosphate
  modified_base 11: mod_base = OTHER; note = 2'-deoxy-2'-fluoroadenosine-3'-phosphate
  modified_base 12: mod_base = OTHER; note = 2'-O-methylguanosine-3'-phosphate
  modified_base 13: mod_base = OTHER; note = 2'-deoxy-2'-fluoroguanosine-3'-phosphate
  modified_base 14: mod_base = OTHER; note = 2'-O-methylguanosine-3'-phosphate
  modified_base 15: mod_base = OTHER; note = 2'-deoxy-2'-fluorouridine-3'-phosphate
  modified_base 16: mod_base = OTHER; note = 2'-O-methyladenosine-3'-phosphate
  modified_base 17: mod_base = OTHER; note = 2'-deoxy-2'-fluorocytidine-3'-phosphate
  modified_base 18: mod_base = OTHER; note = 2'-O-methyladenosine-3'-phosphate
  modified_base 19: mod_base = OTHER; note = 2'-deoxy-2'-fluoroadenosine-3'-phosphate ((2S,4R)-1-[29-[[2-(acetylamino)-2-deoxy-beta-D-galactopyra nosyl]oxy]-14,14-bis[[3-[[3-[[5-[[2-(acetylamino)-2-deoxy-b eta-D-galactopyranosyl]oxy]-1-oxopentyl]amino]propyl]amino] -3-oxopropoxy]methyl]-1,12,19,25-tetraoxo-16-oxa-13,20,24-t riazanonacos-1-yl]-4-hydroxy-2-pyrrolidinyl)methyl ester
ggtatttcctagggtacaa

SEQ ID NO: 494 - RNA, 21 nt, synthetic construct
  source 1..21: mol_type = other RNA
  modified_base 1: mod_base = OTHER; note = 2'-deoxy-2'-fluorocytidine-3'-phosphorothioate
  modified_base 2: mod_base = OTHER; note = 2'-O-methyluridine-3'-phosphorothioate
  modified_base 3: mod_base = OTHER; note = 2'-deoxy-2'-fluoroguanosine-3'-phosphate
  modified_base 4: mod_base = OTHER; note = 2'-O-methylguanosine-3'-phosphate
  modified_base 5: mod_base = OTHER; note = 2'-deoxy-2'-fluorouridine-3'-phosphate
  modified_base 6: mod_base = OTHER; note = 2'-O-methyladenosine-3'-phosphate
  modified_base 7: mod_base = OTHER; note = 2'-deoxy-2'-fluorouridine-3'-phosphate
  modified_base 8: mod_base = OTHER; note = 2'-O-methyluridine-3'-phosphate
  modified_base 9: mod_base = OTHER; note = 2'-deoxy-2'-fluorouridine-3'-phosphate
  modified_base 10: mod_base = OTHER; note = 2'-deoxy-2'-fluorocytidine-3'-phosphate
  modified_base 11: mod_base = OTHER; note = 2'-deoxy-2'-fluorocytidine-3'-phosphate
  modified_base 12: mod_base = OTHER; note = 2'-O-methyluridine-3'-phosphate
  modified_base 13: mod_base = OTHER; note = 2'-deoxy-2'-fluoroadenosine-3'-phosphate
  modified_base 14: mod_base = OTHER; note = 2'-O-methylguanosine-3'-phosphate
  modified_base 15: mod_base = OTHER; note = 2'-deoxy-2'-fluoroguanosine-3'-phosphate
  modified_base 16: mod_base = OTHER; note = 2'-O-methylguanosine-3'-phosphate
  modified_base 17: mod_base = OTHER; note = 2'-deoxy-2'-fluorouridine-3'-phosphate
  modified_base 18: mod_base = OTHER; note = 2'-O-methyladenosine-3'-phosphate
  modified_base 19: mod_base = OTHER; note = 2'-deoxy-2'-fluorocytidine-3'-phosphate
  modified_base 20: mod_base = OTHER; note = 2'-O-methyladenosine-3'-phosphate
  modified_base 21: mod_base = OTHER; note = 2'-deoxy-2'-fluoroadenosine-3'-phosphate ((2S,4R)-1-[29-[[2-(acetylamino)-2-deoxy-beta-D-galactopyra nosyl]oxy]-14,14-bis[[3-[[3-[[5-[[2-(acetylamino)-2-deoxy-b eta-D-galactopyranosyl]oxy]-1-oxopentyl]amino]propyl]amino] -3-oxopropoxy]methyl]-1,12,19,25-tetraoxo-16-oxa-13,20,24-t riazanonacos-1-yl]-4-hydroxy-2-pyrrolidinyl)methyl ester
ctggtatttcctagggtacaa

SEQ ID NO: 495 - RNA, 21 nt, synthetic construct
  source 1..21: mol_type = other RNA
  modified_base 1: mod_base = OTHER; note = 2'-deoxy-2'-fluorocytidine-3'-phosphorothioate
  modified_base 2: mod_base = OTHER; note = 2'-O-methyluridine-3'-phosphorothioate
  modified_base 3: mod_base = OTHER; note = 2'-deoxy-2'-fluoroguanosine-3'-phosphate
  modified_base 4: mod_base = OTHER; note = 2'-O-methylguanosine-3'-phosphate
  modified_base 5: mod_base = OTHER; note = 2'-deoxy-2'-fluorouridine-3'-phosphate
  modified_base 6: mod_base = OTHER; note = 2'-O-methyladenosine-3'-phosphate
  modified_base 7: mod_base = OTHER; note = 2'-deoxy-2'-fluorouridine-3'-phosphate
  modified_base 8: mod_base = OTHER; note = 2'-O-methyluridine-3'-phosphate
  modified_base 9: mod_base = OTHER; note = 2'-deoxy-2'-fluorouridine-3'-phosphate
  modified_base 10: mod_base = OTHER; note = 2'-deoxy-2'-fluorocytidine-3'-phosphate
  modified_base 11: mod_base = OTHER; note = 2'-deoxy-2'-fluorocytidine-3'-phosphate
  modified_base 12: mod_base = OTHER; note = 2'-O-methyluridine-3'-phosphate
  modified_base 13: mod_base = OTHER; note = 2'-deoxy-2'-fluoroadenosine-3'-phosphate
  modified_base 14: mod_base = OTHER; note = 2'-O-methylguanosine-3'-phosphate
  modified_base 15: mod_base = OTHER; note = 2'-deoxy-2'-fluoroguanosine-3'-phosphate
  modified_base 16: mod_base = OTHER; note = 2'-O-methylguanosine-3'-phosphate
  modified_base 17: mod_base = OTHER; note = 2'-deoxy-2'-fluorouridine-3'-phosphate
  modified_base 18: mod_base = OTHER; note = 2'-O-methyladenosine-3'-phosphate
  modified_base 19: mod_base = OTHER; note = 2'-deoxy-2'-fluorocytidine-3'-phosphate
  modified_base 20: mod_base = OTHER; note = 2'-O-methyladenosine-3'-phosphate
  modified_base 21: mod_base = OTHER; note = 2'-deoxy-2'-fluoroadenosine-3'-phosphate ((2S,4R)-1-[29-[[2-(acetylamino)-2-deoxy-beta-D-galactopyra nosyl]oxy]-14,14-bis[[3-[[3-[[5-[[2-(acetylamino)-2-deoxy-b eta-D-galactopyranosyl]oxy]-1-oxopentyl]amino]propyl]amino] -3-oxopropoxy]methyl]-1,12,19,25-tetraoxo-16-oxa-13,20,24-t riazanonacos-1-yl]-4-hydroxy-2-pyrrolidinyl)methyl ester
ctggtatttcctagggtacaa

SEQ ID NO: 496 - RNA, 21 nt, synthetic construct
  source 1..21: mol_type = other RNA
  modified_base 1: mod_base = OTHER; note = 2'-O-methylcytidine-3'-phosphorothioate
  modified_base 2: mod_base = OTHER; note = 2'-O-methyluridine-3'-phosphorothioate
  modified_base 3: mod_base = OTHER; note = 2'-O-methylguanosine-3'-phosphate
  modified_base 4: mod_base = OTHER; note = 2'-O-methylguanosine-3'-phosphate
  modified_base 5: mod_base = OTHER; note = 2'-O-methyluridine-3'-phosphate
  modified_base 6: mod_base = OTHER; note = 2'-O-methyladenosine-3'-phosphate
  modified_base 7: mod_base = OTHER; note = 2'-deoxy-2'-fluorouridine-3'-phosphate
  modified_base 8: mod_base = OTHER; note = 2'-O-methyluridine-3'-phosphate
  modified_base 9: mod_base = OTHER; note = 2'-deoxy-2'-fluorouridine-3'-phosphate
  modified_base 10: mod_base = OTHER; note = 2'-deoxy-2'-fluorocytidine-3'-phosphate
  modified_base 11: mod_base = OTHER; note = 2'-deoxy-2'-fluorocytidine-3'-phosphate
  modified_base 12: mod_base = OTHER; note = 2'-O-methyluridine-3'-phosphate
  modified_base 13: mod_base = OTHER; note = 2'-O-methyladenosine-3'-phosphate
  modified_base 14: mod_base = OTHER; note = 2'-O-methylguanosine-3'-phosphate
  modified_base 15: mod_base = OTHER; note = 2'-O-methylguanosine-3'-phosphate
  modified_base 16: mod_base = OTHER; note = 2'-deoxy-2'-fluoroguanosine-3'-phosphate
  modified_base 17: mod_base = OTHER; note = 2'-O-methyluridine-3'-phosphate
  modified_base 18: mod_base = OTHER; note = 2'-O-methyladenosine-3'-phosphate
  modified_base 19: mod_base = OTHER; note = 2'-O-methylcytidine-3'-phosphate
  modified_base 20: mod_base = OTHER; note = 2'-O-methyladenosine-3'-phosphate
  modified_base 21: mod_base = OTHER; note = 2'-O-methyladenosine-3'-phosphate ((2S,4R)-1-[29-[[2-(acetylamino)-2-deoxy-beta-D-galactopyra nosyl]oxy]-14,14-bis[[3-[[3-[[5-[[2-(acetylamino)-2-deoxy-b eta-D-galactopyranosyl]oxy]-1-oxopentyl]amino]propyl]amino] -3-oxopropoxy]methyl]-1,12,19,25-tetraoxo-16-oxa-13,20,24-t riazanonacos-1-yl]-4-hydroxy-2-pyrrolidinyl)methyl ester
ctggtatttcctagggtacaa

SEQ ID NO: 497 - RNA, 21 nt, synthetic construct
  source 1..21: mol_type = other RNA
  modified_base 1: mod_base = OTHER; note = 2'-O-methylcytidine-3'-phosphorothioate
  modified_base 2: mod_base = OTHER; note = 2'-O-methyluridine-3'-phosphorothioate
  modified_base 3: mod_base = OTHER; note = 2'-deoxy-2'-fluoroguanosine-3'-phosphate
  modified_base 4: mod_base = OTHER; note = 2'-O-methylguanosine-3'-phosphate
  modified_base 5: mod_base = OTHER; note = 2'-O-methyluridine-3'-phosphate
  modified_base 6: mod_base = OTHER; note = 2'-O-methyladenosine-3'-phosphate
  modified_base 7: mod_base = OTHER; note = 2'-deoxy-2'-fluorouridine-3'-phosphate
  modified_base 8: mod_base = OTHER; note = 2'-O-methyluridine-3'-phosphate
  modified_base 9: mod_base = OTHER; note = 2'-deoxy-2'-fluorouridine-3'-phosphate
  modified_base 10: mod_base = OTHER; note = 2'-deoxy-2'-fluorocytidine-3'-phosphate
  modified_base 11: mod_base = OTHER; note = 2'-deoxy-2'-fluorocytidine-3'-phosphate
  modified_base 12: mod_base = OTHER; note = 2'-O-methyluridine-3'-phosphate
  modified_base 13: mod_base = OTHER; note = 2'-deoxy-2'-fluoroadenosine-3'-phosphate
  modified_base 14: mod_base = OTHER; note = 2'-O-methylguanosine-3'-phosphate
  modified_base 15: mod_base = OTHER; note = 2'-deoxy-2'-fluoroguanosine-3'-phosphate
  modified_base 16: mod_base = OTHER; note = 2'-O-methylguanosine-3'-phosphate
  modified_base 17: mod_base = OTHER; note = 2'-O-methyluridine-3'-phosphate
  modified_base 18: mod_base = OTHER; note = 2'-deoxy-2'-fluoroadenosine-3'-phosphate
  modified_base 19: mod_base = OTHER; note = 2'-O-methylcytidine-3'-phosphate
  modified_base 20: mod_base = OTHER; note = 2'-O-methyladenosine-3'-phosphate
  modified_base 21: mod_base = OTHER; note = 2'-O-methyladenosine-3'-phosphate ((2S,4R)-1-[29-[[2-(acetylamino)-2-deoxy-beta-D-galactopyra nosyl]oxy]-14,14-bis[[3-[[3-[[5-[[2-(acetylamino)-2-deoxy-b eta-D-galactopyranosyl]oxy]-1-oxopentyl]amino]propyl]amino] -3-oxopropoxy]methyl]-1,12,19,25-tetraoxo-16-oxa-13,20,24-t riazanonacos-1-yl]-4-hydroxy-2-pyrrolidinyl)methyl ester
ctggtatttcctagggtacaa

SEQ ID NO: 498 - DNA, 21 bp, synthetic construct
  source 1..21: mol_type = other DNA
  modified_base 1: mod_base = OTHER; note = 2'-O-methylcytidine-3'-phosphorothioate
  modified_base 2: mod_base = OTHER; note = 2'-O-methyluridine-3'-phosphorothioate
  modified_base 3: mod_base = OTHER; note = 2'-O-methylguanosine-3'-phosphate
  modified_base 4: mod_base = OTHER; note = 2'-O-methylguanosine-3'-phosphate
  modified_base 5: mod_base = OTHER; note = 2'-O-methyluridine-3'-phosphate
  modified_base 6: mod_base = OTHER; note = 2'-O-methyladenosine-3'-phosphate
  modified_base 7: mod_base = OTHER; note = 2'-deoxy-2'-fluorouridine-3'-phosphate
  modified_base 8: mod_base = OTHER; note = 2'-O-methyluridine-3'-phosphate
  modified_base 9: mod_base = OTHER; note = 2'-deoxy-2'-fluorouridine-3'-phosphate
  modified_base 10: mod_base = OTHER; note = 2'-deoxy-2'-fluorocytidine-3'-phosphate
  modified_base 11: mod_base = OTHER; note = 2'-deoxy-2'-fluorocytidine-3'-phosphate
  modified_base 12: mod_base = OTHER; note = 2'-O-methyluridine-3'-phosphate
  modified_base 13: mod_base = OTHER; note = 2'-O-methyladenosine-3'-phosphate
  modified_base 14: mod_base = OTHER; note = 2'-O-methylguanosine-3'-phosphate
  modified_base 15: mod_base = OTHER; note = 2'-O-methylguanosine-3'-phosphate
  modified_base 16: mod_base = OTHER; note = 2'-deoxy-2'-fluoroguanosine-3'-phosphate
  modified_base 17: mod_base = OTHER; note = 2'-O-methyluridine-3'-phosphate
  modified_base 18: mod_base = OTHER; note = 2'-O-methyladenosine-3'-phosphate
  modified_base 20: mod_base = OTHER; note = 2'-O-methyladenosine-3'-phosphate
  modified_base 21: mod_base = OTHER; note = 2'-O-methyladenosine-3'-phosphate ((2S,4R)-1-[29-[[2-(acetylamino)-2-deoxy-beta-D-galactopyra nosyl]oxy]-14,14-bis[[3-[[3-[[5-[[2-(acetylamino)-2-deoxy-b eta-D-galactopyranosyl]oxy]-1-oxopentyl]amino]propyl]amino] -3-oxopropoxy]methyl]-1,12,19,25-tetraoxo-16-oxa-13,20,24-t riazanonacos-1-yl]-4-hydroxy-2-pyrrolidinyl)methyl ester
  misc_feature 1..18: note = RNA
  misc_feature 20..21: note = RNA
  misc_feature 19: note = DNA
ctggtatttcctagggtacaa

SEQ ID NO: 499 - RNA, 21 nt, synthetic construct
  source 1..21: mol_type = other RNA
  modified_base 1: mod_base = OTHER; note = 2'-deoxy-2'-fluorocytidine-3'-phosphorothioate
  modified_base 2: mod_base = OTHER; note = 2'-O-methyluridine-3'-phosphorothioate
  modified_base 3: mod_base = OTHER; note = 2'-deoxy-2'-fluoroguanosine-3'-phosphate
  modified_base 4: mod_base = OTHER; note = 2'-O-methylguanosine-3'-phosphate
  modified_base 5: mod_base = OTHER; note = 2'-deoxy-2'-fluorouridine-3'-phosphate
  modified_base 6: mod_base = OTHER; note = 2'-O-methyladenosine-3'-phosphate
  modified_base 7: mod_base = OTHER; note = 2'-deoxy-2'-fluorouridine-3'-phosphate
  modified_base 8: mod_base = OTHER; note = 2'-O-methyluridine-3'-phosphate
  modified_base 9: mod_base = OTHER; note = 2'-deoxy-2'-fluorouridine-3'-phosphate
  modified_base 10: mod_base = OTHER; note = 2'-deoxy-2'-fluorocytidine-3'-phosphate
  modified_base 11: mod_base = OTHER; note = 2'-deoxy-2'-fluorocytidine-3'-phosphate
  modified_base 12: mod_base = OTHER; note = 2'-O-methyluridine-3'-phosphate
  modified_base 13: mod_base = OTHER; note = 2'-deoxy-2'-fluoroadenosine-3'-phosphate
  modified_base 14: mod_base = OTHER; note = 2'-O-methylguanosine-3'-phosphate
  modified_base 15: mod_base = OTHER; note = 2'-deoxy-2'-fluoroguanosine-3'-phosphate
  modified_base 16: mod_base = OTHER; note = 2'-O-methylguanosine-3'-phosphate
  modified_base 17: mod_base = OTHER; note = 2'-deoxy-2'-fluorouridine-3'-phosphate
  modified_base 18: mod_base = OTHER; note = 2'-O-methyladenosine-3'-phosphate
  modified_base 19: mod_base = OTHER; note = 2'-deoxy-2'-fluorocytidine-3'-phosphate
  modified_base 20: mod_base = OTHER; note = 2'-O-methyladenosine-3'-phosphate
  modified_base 21: mod_base = OTHER; note = 2'-deoxy-2'-fluoroadenosine-3'-phosphate ((2S,4R)-1-[29-[[2-(acetylamino)-2-deoxy-beta-D-galactopyra nosyl]oxy]-14,14-bis[[3-[[3-[[5-[[2-(acetylamino)-2-deoxy-b eta-D-galactopyranosyl]oxy]-1-oxopentyl]amino]propyl]amino] -3-oxopropoxy]methyl]-1,12,19,25-tetraoxo-16-oxa-13,20,24-t riazanonacos-1-yl]-4-hydroxy-2-pyrrolidinyl)methyl ester
ctggtatttcctagggtacaa

SEQ ID NO: 500 - RNA, 21 nt, synthetic construct
  source 1..21: mol_type = other RNA
  modified_base 1: mod_base = OTHER; note = 2'-O-methylcytidine-3'-phosphorothioate
  modified_base 2: mod_base = OTHER; note = 2'-O-methyluridine-3'-phosphorothioate
  modified_base 3: mod_base = OTHER; note = 2'-deoxy-2'-fluoroguanosine-3'-phosphate
  modified_base 4: mod_base = OTHER; note = 2'-O-methylguanosine-3'-phosphate
  modified_base 5: mod_base = OTHER; note = 2'-O-methyluridine-3'-phosphate
  modified_base 6: mod_base = OTHER; note = 2'-O-methyladenosine-3'-phosphate
  modified_base 7: mod_base = OTHER; note = 2'-deoxy-2'-fluorouridine-3'-phosphate
  modified_base 8: mod_base = OTHER; note = 2'-O-methyluridine-3'-phosphate
  modified_base 9: mod_base = OTHER; note = 2'-deoxy-2'-fluorouridine-3'-phosphate
  modified_base 10: mod_base = OTHER; note = 2'-deoxy-2'-fluorocytidine-3'-phosphate
  modified_base 11: mod_base = OTHER; note = 2'-deoxy-2'-fluorocytidine-3'-phosphate
  modified_base 12: mod_base = OTHER; note = 2'-O-methyluridine-3'-phosphate
  modified_base 13: mod_base = OTHER; note = 2'-deoxy-2'-fluoroadenosine-3'-phosphate
  modified_base 14: mod_base = OTHER; note = 2'-O-methylguanosine-3'-phosphate
  modified_base 15: mod_base = OTHER; note = 2'-deoxy-2'-fluoroguanosine-3'-phosphate
  modified_base 16: mod_base = OTHER; note = 2'-O-methylguanosine-3'-phosphate
  modified_base 17: mod_base = OTHER; note = 2'-O-methyluridine-3'-phosphate
  modified_base 18: mod_base = OTHER; note = 2'-deoxy-2'-fluoroadenosine-3'-phosphate
  modified_base 19: mod_base = OTHER; note = 2'-O-methylcytidine-3'-phosphate
  modified_base 20: mod_base = OTHER; note = 2'-O-methyladenosine-3'-phosphate
  modified_base 21: mod_base = OTHER; note = 2'-O-methyladenosine-3'-phosphate ((2S,4R)-1-[29-[[2-(acetylamino)-2-deoxy-beta-D-galactopyra nosyl]oxy]-14,14-bis[[3-[[3-[[5-[[2-(acetylamino)-2-deoxy-b eta-D-galactopyranosyl]oxy]-1-oxopentyl]amino]propyl]amino] -3-oxopropoxy]methyl]-1,12,19,25-tetraoxo-16-oxa-13,20,24-t riazanonacos-1-yl]-4-hydroxy-2-pyrrolidinyl)methyl ester
ctggtatttcctagggtacaa

SEQ ID NO: 501 - RNA, 21 nt, synthetic construct
  source 1..21: mol_type = other RNA
  modified_base 1: mod_base = OTHER; note = 2'-deoxy-2'-fluorocytidine-3'-phosphorothioate
  modified_base 2: mod_base = OTHER; note = 2'-O-methyluridine-3'-phosphorothioate
  modified_base 3: mod_base = OTHER; note = 2'-deoxy-2'-fluoroguanosine-3'-phosphate
  modified_base 4: mod_base = OTHER; note = 2'-O-methylguanosine-3'-phosphate
  modified_base 5: mod_base = OTHER; note = 2'-deoxy-2'-fluorouridine-3'-phosphate
  modified_base 6: mod_base = OTHER; note = 2'-O-methyladenosine-3'-phosphate
  modified_base 7: mod_base = OTHER; note = 2'-deoxy-2'-fluorouridine-3'-phosphate
  modified_base 8: mod_base = OTHER; note = 2'-O-methyluridine-3'-phosphate
  modified_base 9: mod_base = OTHER; note = 2'-deoxy-2'-fluorouridine-3'-phosphate
  modified_base 10: mod_base = OTHER; note = 2'-deoxy-2'-fluorocytidine-3'-phosphate
  modified_base 11: mod_base = OTHER; note = 2'-deoxy-2'-fluorocytidine-3'-phosphate
  modified_base 12: mod_base = OTHER; note = 2'-O-methyluridine-3'-phosphate
  modified_base 13: mod_base = OTHER; note = 2'-deoxy-2'-fluoroadenosine-3'-phosphate
  modified_base 14: mod_base = OTHER; note = 2'-O-methylguanosine-3'-phosphate
  modified_base 15: mod_base = OTHER; note = 2'-deoxy-2'-fluoroguanosine-3'-phosphate
  modified_base 16: mod_base = OTHER; note = 2'-O-methylguanosine-3'-phosphate
  modified_base 17: mod_base = OTHER; note = 2'-deoxy-2'-fluorouridine-3'-phosphate
  modified_base 18: mod_base = OTHER; note = 2'-O-methyladenosine-3'-phosphate
  modified_base 19: mod_base = OTHER; note = 2'-deoxy-2'-fluorocytidine-3'-phosphate
  modified_base 20: mod_base = OTHER; note = 2'-O-methyladenosine-3'-phosphate
  modified_base 21: mod_base = OTHER; note = 2'-deoxy-2'-fluoroadenosine-3'-phosphate ((2S,4R)-1-[29-[[2-(acetylamino)-2-deoxy-beta-D-galactopyra nosyl]oxy]-14,14-bis[[3-[[3-[[5-[[2-(acetylamino)-2-deoxy-b eta-D-galactopyranosyl]oxy]-1-oxopentyl]amino]propyl]amino] -3-oxopropoxy]methyl]-1,12,19,25-tetraoxo-16-oxa-13,20,24-t riazanonacos-1-yl]-4-hydroxy-2-pyrrolidinyl)methyl ester
ctggtatttcctagggtacaa

SEQ ID NO: 502 - RNA, 21 nt, synthetic construct
  source 1..21: mol_type = other RNA
  modified_base 1: mod_base = OTHER; note = 2'-deoxy-2'-fluorocytidine-3'-phosphorothioate
  modified_base 2: mod_base = OTHER; note = 2'-O-methyluridine-3'-phosphorothioate
  modified_base 3: mod_base = OTHER; note = 2'-deoxy-2'-fluoroguanosine-3'-phosphate
  modified_base 4: mod_base = OTHER; note = 2'-O-methylguanosine-3'-phosphate
  modified_base 5: mod_base = OTHER; note = 2'-deoxy-2'-fluorouridine-3'-phosphate
  modified_base 6: mod_base = OTHER; note = 2'-O-methyladenosine-3'-phosphate
  modified_base 7: mod_base = OTHER; note = 2'-deoxy-2'-fluorouridine-3'-phosphate
  modified_base 8: mod_base = OTHER; note = 2'-O-methyluridine-3'-phosphate
  modified_base 9: mod_base = OTHER; note = 2'-deoxy-2'-fluorouridine-3'-phosphate
  modified_base 10: mod_base = OTHER; note = 2'-deoxy-2'-fluorocytidine-3'-phosphate
  modified_base 11: mod_base = OTHER; note = 2'-deoxy-2'-fluorocytidine-3'-phosphate
  modified_base 12: mod_base = OTHER; note = 2'-O-methyluridine-3'-phosphate
  modified_base 13: mod_base = OTHER; note = 2'-deoxy-2'-fluoroadenosine-3'-phosphate
  modified_base 14: mod_base = OTHER; note = 2'-O-methylguanosine-3'-phosphate
  modified_base 15: mod_base = OTHER; note = 2'-deoxy-2'-fluoroguanosine-3'-phosphate
  modified_base 16: mod_base = OTHER; note = 2'-O-methylguanosine-3'-phosphate
  modified_base 17: mod_base = OTHER; note = 2'-deoxy-2'-fluorouridine-3'-phosphate
  modified_base 18: mod_base = OTHER; note = 2'-O-methyladenosine-3'-phosphate
  modified_base 19: mod_base = OTHER; note = 2'-deoxy-2'-fluorocytidine-3'-phosphate
  modified_base 20: mod_base = OTHER; note = 2'-O-methyladenosine-3'-phosphate
  modified_base 21: mod_base = OTHER; note = 2'-deoxy-2'-fluoroadenosine-3'-phosphate ((2S,4R)-1-[29-[[2-(acetylamino)-2-deoxy-beta-D-galactopyra nosyl]oxy]-14,14-bis[[3-[[3-[[5-[[2-(acetylamino)-2-deoxy-b eta-D-galactopyranosyl]oxy]-1-oxopentyl]amino]propyl]amino] -3-oxopropoxy]methyl]-1,12,19,25-tetraoxo-16-oxa-13,20,24-t riazanonacos-1-yl]-4-hydroxy-2-pyrrolidinyl)methyl ester
ctggtatttcctagggtacaa

SEQ ID NO: 503 - RNA, 21 nt, synthetic construct
  source 1..21: mol_type = other RNA
  modified_base 1: mod_base = OTHER; note = 2'-deoxy-2'-fluorocytidine-3'-phosphorothioate
  modified_base 2: mod_base = OTHER; note = 2'-O-methyluridine-3'-phosphorothioate
  modified_base 3: mod_base = OTHER; note = 2'-deoxy-2'-fluoroguanosine-3'-phosphate
  modified_base 4: mod_base = OTHER; note = 2'-O-methylguanosine-3'-phosphate
  modified_base 5: mod_base = OTHER; note = 2'-deoxy-2'-fluorouridine-3'-phosphate
  modified_base 6: mod_base = OTHER; note = 2'-O-methyladenosine-3'-phosphate
  modified_base 7: mod_base = OTHER; note = 2'-deoxy-2'-fluorouridine-3'-phosphate
  modified_base 8: mod_base = OTHER; note = 2'-O-methyluridine-3'-phosphate
  modified_base 9: mod_base = OTHER; note = 2'-deoxy-2'-fluorouridine-3'-phosphate
  modified_base 10: mod_base = OTHER; note = 2'-deoxy-2'-fluorocytidine-3'-phosphate
  modified_base 11: mod_base = OTHER; note = 2'-deoxy-2'-fluorocytidine-3'-phosphate
  modified_base 12: mod_base = OTHER; note = 2'-O-methyluridine-3'-phosphate
  modified_base 13: mod_base = OTHER; note = 2'-deoxy-2'-fluoroadenosine-3'-phosphate
  modified_base 14: mod_base = OTHER; note = 2'-O-methylguanosine-3'-phosphate
  modified_base 15: mod_base = OTHER; note = 2'-deoxy-2'-fluoroguanosine-3'-phosphate
  modified_base 16: mod_base = OTHER; note = 2'-O-methylguanosine-3'-phosphate
  modified_base 17: mod_base = OTHER; note = 2'-deoxy-2'-fluorouridine-3'-phosphate
  modified_base 18: mod_base = OTHER; note = 2'-O-methyladenosine-3'-phosphate
  modified_base 19: mod_base = OTHER; note = 2'-deoxy-2'-fluorocytidine-3'-phosphate
  modified_base 20: mod_base = OTHER; note = 2'-O-methyladenosine-3'-phosphate
  modified_base 21: mod_base = OTHER; note = 2'-deoxy-2'-fluoroadenosine-3'-phosphate ((2S,4R)-1-[29-[[2-(acetylamino)-2-deoxy-beta-D-galactopyra nosyl]oxy]-14,14-bis[[3-[[3-[[5-[[2-(acetylamino)-2-deoxy-b eta-D-galactopyranosyl]oxy]-1-oxopentyl]amino]propyl]amino] -3-oxopropoxy]methyl]-1,12,19,25-tetraoxo-16-oxa-13,20,24-t riazanonacos-1-yl]-4-hydroxy-2-pyrrolidinyl)methyl ester
ctggtatttcctagggtacaa

SEQ ID NO: 504 - RNA, 21 nt, synthetic construct
  source 1..21: mol_type = other RNA
  modified_base 1: mod_base = OTHER; note = 2'-O-methylcytidine-3'-phosphorothioate
  modified_base 2: mod_base = OTHER; note = 2'-O-methyluridine-3'-phosphorothioate
  modified_base 3: mod_base = OTHER; note = 2'-deoxy-2'-fluoroguanosine-3'-phosphate
  modified_base 4: mod_base = OTHER; note = 2'-O-methylguanosine-3'-phosphate
  modified_base 5: mod_base = OTHER; note = 2'-O-methyluridine-3'-phosphate
  modified_base 6: mod_base = OTHER; note = 2'-O-methyladenosine-3'-phosphate
  modified_base 7: mod_base = OTHER; note = 2'-deoxy-2'-fluorouridine-3'-phosphate
  modified_base 8: mod_base = OTHER; note = 2'-O-methyluridine-3'-phosphate
  modified_base 9: mod_base = OTHER; note = 2'-deoxy-2'-fluorouridine-3'-phosphate
  modified_base 10: mod_base = OTHER; note = 2'-deoxy-2'-fluorocytidine-3'-phosphate
  modified_base 11: mod_base = OTHER; note = 2'-deoxy-2'-fluorocytidine-3'-phosphate
  modified_base 12: mod_base = OTHER; note = 2'-O-methyluridine-3'-phosphate
  modified_base 13: mod_base = OTHER; note = 2'-deoxy-2'-fluoroadenosine-3'-phosphate
  modified_base 14: mod_base = OTHER; note = 2'-O-methylguanosine-3'-phosphate
  modified_base 15: mod_base = OTHER; note = 2'-deoxy-2'-fluoroguanosine-3'-phosphate
  modified_base 16: mod_base = OTHER; note = 2'-O-methylguanosine-3'-phosphate
  modified_base 17: mod_base = OTHER; note = 2'-O-methyluridine-3'-phosphate
  modified_base 18: mod_base = OTHER; note = 2'-deoxy-2'-fluoroadenosine-3'-phosphate
  modified_base 19: mod_base = OTHER; note = 2'-O-methylcytidine-3'-phosphate
  modified_base 20: mod_base = OTHER; note = 2'-O-methyladenosine-3'-phosphate
  modified_base 21: mod_base = OTHER; note = 2'-O-methyladenosine-3'-phosphate ((2S,4R)-1-[29-[[2-(acetylamino)-2-deoxy-beta-D-galactopyra nosyl]oxy]-14,14-bis[[3-[[3-[[5-[[2-(acetylamino)-2-deoxy-b eta-D-galactopyranosyl]oxy]-1-oxopentyl]amino]propyl]amino] -3-oxopropoxy]methyl]-1,12,19,25-tetraoxo-16-oxa-13,20,24-t riazanonacos-1-yl]-4-hydroxy-2-pyrrolidinyl)methyl ester
ctggtatttcctagggtacaa

SEQ ID NO: 505 - RNA, 21 nt, synthetic construct
  source 1..21: mol_type = other RNA
  modified_base 1: mod_base = OTHER; note = 2'-O-methylcytidine-3'-phosphorothioate
  modified_base 2: mod_base = OTHER; note = 2'-O-methyluridine-3'-phosphorothioate
  modified_base 3: mod_base = OTHER; note = 2'-O-methylguanosine-3'-phosphate
  modified_base 4: mod_base = OTHER; note = 2'-O-methylguanosine-3'-phosphate
  modified_base 5: mod_base = OTHER; note = 2'-O-methyluridine-3'-phosphate
  modified_base 6: mod_base = OTHER; note = 2'-O-methyladenosine-3'-phosphate
  modified_base 7: mod_base = OTHER; note = 2'-deoxy-2'-fluorouridine-3'-phosphate
  modified_base 8: mod_base = OTHER; note = 2'-O-methyluridine-3'-phosphate
  modified_base 9: mod_base = OTHER; note = 2'-deoxy-2'-fluorouridine-3'-phosphate
  modified_base 10: mod_base = OTHER; note = 2'-deoxy-2'-fluorocytidine-3'-phosphate
  modified_base 11: mod_base = OTHER; note = 2'-deoxy-2'-fluorocytidine-3'-phosphate
  modified_base 12: mod_base = OTHER; note = 2'-O-methyluridine-3'-phosphate
  modified_base 13: mod_base = OTHER; note = 2'-O-methyladenosine-3'-phosphate
  modified_base 14: mod_base = OTHER; note = 2'-O-methylguanosine-3'-phosphate
  modified_base 15: mod_base = OTHER; note = 2'-O-methylguanosine-3'-phosphate
  modified_base 16: mod_base = OTHER; note = 2'-deoxy-2'-fluoroguanosine-3'-phosphate
  modified_base 17: mod_base = OTHER; note = 2'-O-methyluridine-3'-phosphate
  modified_base 18: mod_base = OTHER; note = 2'-O-methyladenosine-3'-phosphate
  modified_base 19: mod_base = OTHER; note = 2'-O-methylcytidine-3'-phosphate
  modified_base 20: mod_base = OTHER; note = 2'-O-methyladenosine-3'-phosphate
  modified_base 21: mod_base = OTHER; note = 2'-O-methyladenosine-3'-phosphate ((2S,4R)-1-[29-[[2-(acetylamino)-2-deoxy-beta-D-galactopyra nosyl]oxy]-14,14-bis[[3-[[3-[[5-[[2-(acetylamino)-2-deoxy-b eta-D-galactopyranosyl]oxy]-1-oxopentyl]amino]propyl]amino] -3-oxopropoxy]methyl]-1,12,19,25-tetraoxo-16-oxa-13,20,24-t riazanonacos-1-yl]-4-hydroxy-2-pyrrolidinyl)methyl ester
ctggtatttcctagggtacaa

SEQ ID NO: 506 - RNA, 21 nt, synthetic construct
  source 1..21: mol_type = other RNA
  modified_base 1: mod_base = OTHER; note = 2'-deoxy-2'-fluorocytidine-3'-phosphorothioate
  modified_base 2: mod_base = OTHER; note = 2'-O-methyluridine-3'-phosphorothioate
  modified_base 3: mod_base = OTHER; note = 2'-deoxy-2'-fluoroguanosine-3'-phosphate
  modified_base 4: mod_base = OTHER; note = 2'-O-methylguanosine-3'-phosphate
  modified_base 5: mod_base = OTHER; note = 2'-deoxy-2'-fluorouridine-3'-phosphate
  modified_base 6: mod_base = OTHER; note = 2'-O-methyladenosine-3'-phosphate
  modified_base 7: mod_base = OTHER; note = 2'-deoxy-2'-fluorouridine-3'-phosphate
  modified_base 8: mod_base = OTHER; note = 2'-O-methyluridine-3'-phosphate
  modified_base 9: mod_base = OTHER; note = 2'-deoxy-2'-fluorouridine-3'-phosphate
  modified_base 10: mod_base = OTHER; note = 2'-deoxy-2'-fluorocytidine-3'-phosphate
  modified_base 11: mod_base = OTHER; note = 2'-deoxy-2'-fluorocytidine-3'-phosphate
  modified_base 12: mod_base = OTHER; note = 2'-O-methyluridine-3'-phosphate
  modified_base 13: mod_base = OTHER; note = 2'-deoxy-2'-fluoroadenosine-3'-phosphate
  modified_base 14: mod_base = OTHER; note = 2'-O-methylguanosine-3'-phosphate
  modified_base 15: mod_base = OTHER; note = 2'-deoxy-2'-fluoroguanosine-3'-phosphate
  modified_base 16: mod_base = OTHER; note = 2'-O-methylguanosine-3'-phosphate
  modified_base 17: mod_base = OTHER; note = 2'-deoxy-2'-fluorouridine-3'-phosphate
  modified_base 18: mod_base = OTHER; note = 2'-O-methyladenosine-3'-phosphate
  modified_base 19: mod_base = OTHER; note = 2'-deoxy-2'-fluorocytidine-3'-phosphate
  modified_base 20: mod_base = OTHER; note = 2'-O-methyladenosine-3'-phosphate
  modified_base 21: mod_base = OTHER; note = 2'-deoxy-2'-fluoroadenosine-3'-phosphate ((2S,4R)-1-[29-[[2-(acetylamino)-2-deoxy-beta-D-galactopyra nosyl]oxy]-14,14-bis[[3-[[3-[[5-[[2-(acetylamino)-2-deoxy-b eta-D-galactopyranosyl]oxy]-1-oxopentyl]amino]propyl]amino] -3-oxopropoxy]methyl]-1,12,19,25-tetraoxo-16-oxa-13,20,24-t riazanonacos-1-yl]-4-hydroxy-2-pyrrolidinyl)methyl ester
ctggtatttcctagggtacaa

SEQ ID NO: 507 - RNA, 21 nt, synthetic construct
  source 1..21: mol_type = other RNA
  modified_base 1: mod_base = OTHER; note = 2'-O-methylcytidine-3'-phosphorothioate
  modified_base 2: mod_base = OTHER; note = 2'-O-methyluridine-3'-phosphorothioate
  modified_base 3: mod_base = OTHER; note = 2'-deoxy-2'-fluoroguanosine-3'-phosphate
  modified_base 4: mod_base = OTHER; note = 2'-O-methylguanosine-3'-phosphate
  modified_base 5: mod_base = OTHER; note = 2'-O-methyluridine-3'-phosphate
  modified_base 6: mod_base = OTHER; note = 2'-O-methyladenosine-3'-phosphate
  modified_base 7: mod_base = OTHER; note = 2'-deoxy-2'-fluorouridine-3'-phosphate
  modified_base 8: mod_base = OTHER; note = 2'-O-methyluridine-3'-phosphate
  modified_base 9: mod_base = OTHER; note = 2'-deoxy-2'-fluorouridine-3'-phosphate
  modified_base 10: mod_base = OTHER; note = 2'-deoxy-2'-fluorocytidine-3'-phosphate
  modified_base 11: mod_base = OTHER; note = 2'-deoxy-2'-fluorocytidine-3'-phosphate
  modified_base 12: mod_base = OTHER; note = 2'-O-methyluridine-3'-phosphate
  modified_base 13: mod_base = OTHER; note = 2'-deoxy-2'-fluoroadenosine-3'-phosphate
  modified_base 14: mod_base = OTHER; note = 2'-O-methylguanosine-3'-phosphate
  modified_base 15: mod_base = OTHER; note = 2'-deoxy-2'-fluoroguanosine-3'-phosphate
  modified_base 16: mod_base = OTHER; note = 2'-O-methylguanosine-3'-phosphate
  modified_base 17: mod_base = OTHER; note = 2'-O-methyluridine-3'-phosphate
  modified_base 18: mod_base = OTHER; note = 2'-deoxy-2'-fluoroadenosine-3'-phosphate
  modified_base 19: mod_base = OTHER; note = 2'-O-methylcytidine-3'-phosphate
  modified_base 20: mod_base = OTHER; note = 2'-O-methyladenosine-3'-phosphate
  modified_base 21: mod_base = OTHER; note = 2'-O-methyladenosine-3'-phosphate ((2S,4R)-1-[29-[[2-(acetylamino)-2-deoxy-beta-D-galactopyra nosyl]oxy]-14,14-bis[[3-[[3-[[5-[[2-(acetylamino)-2-deoxy-b eta-D-galactopyranosyl]oxy]-1-oxopentyl]amino]propyl]amino] -3-oxopropoxy]methyl]-1,12,19,25-tetraoxo-16-oxa-13,20,24-t riazanonacos-1-yl]-4-hydroxy-2-pyrrolidinyl)methyl ester
ctggtatttcctagggtacaa

SEQ ID NO: 508 - RNA, 21 nt, synthetic construct
  source 1..21: mol_type = other RNA
  modified_base 1: mod_base = OTHER; note = 2'-deoxy-2'-fluorocytidine-3'-phosphorothioate
  modified_base 2: mod_base = OTHER; note = 2'-O-methyluridine-3'-phosphorothioate
  modified_base 3: mod_base = OTHER; note = 2'-deoxy-2'-fluoroguanosine-3'-phosphate
  modified_base 4: mod_base = OTHER; note = 2'-O-methylguanosine-3'-phosphate
  modified_base 5: mod_base = OTHER; note = 2'-deoxy-2'-fluorouridine-3'-phosphate
  modified_base 6: mod_base = OTHER; note = 2'-O-methyladenosine-3'-phosphate
  modified_base 7: mod_base = OTHER; note = 2'-deoxy-2'-fluorouridine-3'-phosphate
  modified_base 8: mod_base = OTHER; note = 2'-O-methyluridine-3'-phosphate
  modified_base 9: mod_base = OTHER; note = 2'-deoxy-2'-fluorouridine-3'-phosphate
  modified_base 10: mod_base = OTHER; note = 2'-deoxy-2'-fluorocytidine-3'-phosphate
  modified_base 11: mod_base = OTHER; note = 2'-deoxy-2'-fluorocytidine-3'-phosphate
  modified_base 12: mod_base = OTHER; note = 2'-O-methyluridine-3'-phosphate
  modified_base 13: mod_base = OTHER; note = 2'-deoxy-2'-fluoroadenosine-3'-phosphate
  modified_base 14: mod_base = OTHER; note = 2'-O-methylguanosine-3'-phosphate
  modified_base 15: mod_base = OTHER; note = 2'-deoxy-2'-fluoroguanosine-3'-phosphate
  modified_base 16: mod_base = OTHER; note = 2'-O-methylguanosine-3'-phosphate
  modified_base 17: mod_base = OTHER; note = 2'-deoxy-2'-fluorouridine-3'-phosphate
  modified_base 18: mod_base = OTHER; note = 2'-O-methyladenosine-3'-phosphate
  modified_base 19: mod_base = OTHER; note = 2'-deoxy-2'-fluorocytidine-3'-phosphate
  modified_base 20: mod_base = OTHER; note = 2'-O-methyladenosine-3'-phosphate
  modified_base 21: mod_base = OTHER; note = 2'-deoxy-2'-fluoroadenosine-3'-phosphate ((2S,4R)-1-[29-[[2-(acetylamino)-2-deoxy-beta-D-galactopyra nosyl]oxy]-14,14-bis[[3-[[3-[[5-[[2-(acetylamino)-2-deoxy-b eta-D-galactopyranosyl]oxy]-1-oxopentyl]amino]propyl]amino] -3-oxopropoxy]methyl]-1,12,19,25-tetraoxo-16-oxa-13,20,24-t riazanonacos-1-yl]-4-hydroxy-2-pyrrolidinyl)methyl ester
ctggtatttcctagggtacaa

SEQ ID NO: 509 - RNA, 21 nt, synthetic construct
  source 1..21: mol_type = other RNA
  modified_base 1: mod_base = OTHER; note = 2'-O-methylcytidine-3'-phosphorothioate
  modified_base 2: mod_base = OTHER; note = 2'-O-methyluridine-3'-phosphorothioate
  modified_base 3: mod_base = OTHER; note = 2'-deoxy-2'-fluoroguanosine-3'-phosphate
  modified_base 4: mod_base = OTHER; note = 2'-O-methylguanosine-3'-phosphate
  modified_base 5: mod_base = OTHER; note = 2'-O-methyluridine-3'-phosphate
  modified_base 6: mod_base = OTHER; note = 2'-O-methyladenosine-3'-phosphate
  modified_base 7: mod_base = OTHER; note = 2'-deoxy-2'-fluorouridine-3'-phosphate
  modified_base 8: mod_base = OTHER; note = 2'-O-methyluridine-3'-phosphate
  modified_base 9: mod_base = OTHER; note = 2'-deoxy-2'-fluorouridine-3'-phosphate
  modified_base 10: mod_base = OTHER; note = 2'-deoxy-2'-fluorocytidine-3'-phosphate
  modified_base 11: mod_base = OTHER; note = 2'-deoxy-2'-fluorocytidine-3'-phosphate
  modified_base 12: mod_base = OTHER; note = 2'-O-methyluridine-3'-phosphate
  modified_base 13: mod_base = OTHER; note = 2'-deoxy-2'-fluoroadenosine-3'-phosphate
  modified_base 14: mod_base = OTHER; note = 2'-O-methylguanosine-3'-phosphate
  modified_base 15: mod_base = OTHER; note = 2'-deoxy-2'-fluoroguanosine-3'-phosphate
  modified_base 16: mod_base = OTHER; note = 2'-O-methylguanosine-3'-phosphate
  modified_base 17: mod_base = OTHER; note = 2'-O-methyluridine-3'-phosphate
  modified_base 18: mod_base = OTHER; note = 2'-deoxy-2'-fluoroadenosine-3'-phosphate
  modified_base 19: mod_base = OTHER; note = 2'-O-methylcytidine-3'-phosphate
  modified_base 20: mod_base = OTHER; note = 2'-O-methyladenosine-3'-phosphate
  modified_base 21: mod_base = OTHER; note = 2'-O-methyladenosine-3'-phosphate ((2S,4R)-1-[29-[[2-(acetylamino)-2-deoxy-beta-D-galactopyra nosyl]oxy]-14,14-bis[[3-[[3-[[5-[[2-(acetylamino)-2-deoxy-b eta-D-galactopyranosyl]oxy]-1-oxopentyl]amino]propyl]amino] -3-oxopropoxy]methyl]-1,12,19,25-tetraoxo-16-oxa-13,20,24-t riazanonacos-1-yl]-4-hydroxy-2-pyrrolidinyl)methyl ester
ctggtatttcctagggtacaa

SEQ ID NO: 510 - RNA, 21 nt, synthetic construct
  source 1..21: mol_type = other RNA
  modified_base 1: mod_base = OTHER; note = 2'-deoxy-2'-fluorocytidine-3'-phosphorothioate
  modified_base 2: mod_base = OTHER; note = 2'-O-methyluridine-3'-phosphorothioate
  modified_base 3: mod_base = OTHER; note = 2'-deoxy-2'-fluoroguanosine-3'-phosphate
  modified_base 4: mod_base = OTHER; note = 2'-O-methylguanosine-3'-phosphate
  modified_base 5: mod_base = OTHER; note = 2'-deoxy-2'-fluorouridine-3'-phosphate
  modified_base 6: mod_base = OTHER; note = 2'-O-methyladenosine-3'-phosphate
  modified_base 7: mod_base = OTHER; note = 2'-deoxy-2'-fluorouridine-3'-phosphate
  modified_base 8: mod_base = OTHER; note = 2'-O-methyluridine-3'-phosphate
  modified_base 9: mod_base = OTHER; note = 2'-deoxy-2'-fluorouridine-3'-phosphate
  modified_base 10: mod_base = OTHER; note = 2'-deoxy-2'-fluorocytidine-3'-phosphate
  modified_base 11: mod_base = OTHER; note = 2'-deoxy-2'-fluorocytidine-3'-phosphate
  modified_base 12: mod_base = OTHER; note = 2'-O-methyluridine-3'-phosphate
  modified_base 13: mod_base = OTHER; note = 2'-deoxy-2'-fluoroadenosine-3'-phosphate
  modified_base 14: mod_base = OTHER; note = 2'-O-methylguanosine-3'-phosphate
  modified_base 15: mod_base = OTHER; note = 2'-deoxy-2'-fluoroguanosine-3'-phosphate
  modified_base 16: mod_base = OTHER; note = 2'-O-methylguanosine-3'-phosphate
  modified_base 17: mod_base = OTHER; note = 2'-deoxy-2'-fluorouridine-3'-phosphate
  modified_base 18: mod_base = OTHER; note = 2'-O-methyladenosine-3'-phosphate
  modified_base 19: mod_base = OTHER; note = 2'-deoxy-2'-fluorocytidine-3'-phosphate
  modified_base 20: mod_base = OTHER; note = 2'-O-methyladenosine-3'-phosphate
  modified_base 21: mod_base = OTHER; note = 2'-deoxy-2'-fluoroadenosine-3'-phosphate ((2S,4R)-1-[29-[[2-(acetylamino)-2-deoxy-beta-D-galactopyra nosyl]oxy]-14,14-bis[[3-[[3-[[5-[[2-(acetylamino)-2-deoxy-b eta-D-galactopyranosyl]oxy]-1-oxopentyl]amino]propyl]amino] -3-oxopropoxy]methyl]-1,12,19,25-tetraoxo-16-oxa-13,20,24-t riazanonacos-1-yl]-4-hydroxy-2-pyrrolidinyl)methyl ester
ctggtatttcctagggtacaa

SEQ ID NO: 511 - RNA, 21 nt, synthetic construct
  source 1..21: mol_type = other RNA
  modified_base 1: mod_base = OTHER; note = 2'-O-methylcytidine-3'-phosphorothioate
  modified_base 2: mod_base = OTHER; note = 2'-O-methyluridine-3'-phosphorothioate
  modified_base 3: mod_base = OTHER; note = 2'-deoxy-2'-fluoroguanosine-3'-phosphate
  modified_base 4: mod_base = OTHER; note = 2'-O-methylguanosine-3'-phosphate
  modified_base 5: mod_base = OTHER; note = 2'-deoxy-2'-fluorouridine-3'-phosphate
  modified_base 6: mod_base = OTHER; note = 2'-O-methyladenosine-3'-phosphate
  modified_base 7: mod_base = OTHER; note = 2'-deoxy-2'-fluorouridine-3'-phosphate
  modified_base 8: mod_base = OTHER; note = 2'-O-methyluridine-3'-phosphate
  modified_base 9: mod_base = OTHER; note = 2'-deoxy-2'-fluorouridine-3'-phosphate
  modified_base 10: mod_base = OTHER; note = 2'-deoxy-2'-fluorocytidine-3'-phosphate
  modified_base 11: mod_base = OTHER; note = 2'-deoxy-2'-fluorocytidine-3'-phosphate
  modified_base 12: mod_base = OTHER; note = 2'-O-methyluridine-3'-phosphate
  modified_base 13: mod_base = OTHER; note = 2'-deoxy-2'-fluoroadenosine-3'-phosphate
  modified_base 14: mod_base = OTHER; note = 2'-O-methylguanosine-3'-phosphate
  modified_base 15: mod_base = OTHER; note = 2'-deoxy-2'-fluoroguanosine-3'-phosphate
  modified_base 16: mod_base = OTHER; note = 2'-O-methylguanosine-3'-phosphate
  modified_base 17: mod_base = OTHER; note = 2'-deoxy-2'-fluorouridine-3'-phosphate
  modified_base 18: mod_base = OTHER; note = 2'-O-methyladenosine-3'-phosphate
  modified_base 19: mod_base = OTHER; note = 2'-deoxy-2'-fluorocytidine-3'-phosphate
  modified_base 20: mod_base = OTHER; note = 2'-O-methyladenosine-3'-phosphate
  modified_base 21: mod_base = OTHER; note = 2'-deoxy-2'-fluoroadenosine-3'-phosphate ((2S,4R)-1-[29-[[2-(acetylamino)-2-deoxy-beta-D-galactopyra nosyl]oxy]-14,14-bis[[3-[[3-[[5-[[2-(acetylamino)-2-deoxy-b eta-D-galactopyranosyl]oxy]-1-oxopentyl]amino]propyl]amino] -3-oxopropoxy]methyl]-1,12,19,25-tetraoxo-16-oxa-13,20,24-t riazanonacos-1-yl]-4-hydroxy-2-pyrrolidinyl)methyl ester
ctggtatttcctagggtacaa

SEQ ID NO: 512 - RNA, 21 nt, synthetic construct
  source 1..21: mol_type = other RNA
  modified_base 1: mod_base = OTHER; note = 2'-O-methylcytidine-3'-phosphorothioate
  modified_base 2: mod_base = OTHER; note = 2'-O-methyluridine-3'-phosphorothioate
  modified_base 3: mod_base = OTHER; note = 2'-deoxy-2'-fluoroguanosine-3'-phosphate
  modified_base 4: mod_base = OTHER; note = 2'-O-methylguanosine-3'-phosphate
  modified_base 5: mod_base = OTHER; note = 2'-O-methyluridine-3'-phosphate
  modified_base 6: mod_base = OTHER; note = 2'-O-methyladenosine-3'-phosphate
  modified_base 7: mod_base = OTHER; note = 2'-deoxy-2'-fluorouridine-3'-phosphate
  modified_base 8: mod_base = OTHER; note = 2'-O-methyluridine-3'-phosphate
  modified_base 9: mod_base = OTHER; note = 2'-deoxy-2'-fluorouridine-3'-phosphate
  modified_base 10: mod_base = OTHER; note = 2'-deoxy-2'-fluorocytidine-3'-phosphate
  modified_base 11: mod_base = OTHER; note = 2'-deoxy-2'-fluorocytidine-3'-phosphate
  modified_base 12: mod_base = OTHER; note = 2'-O-methyluridine-3'-phosphate
  modified_base 13: mod_base = OTHER; note = 2'-deoxy-2'-fluoroadenosine-3'-phosphate
  modified_base 14: mod_base = OTHER; note = 2'-O-methylguanosine-3'-phosphate
  modified_base 15: mod_base = OTHER; note = 2'-deoxy-2'-fluoroguanosine-3'-phosphate
  modified_base 16: mod_base = OTHER; note = 2'-O-methylguanosine-3'-phosphate
  modified_base 17: mod_base = OTHER; note = 2'-O-methyluridine-3'-phosphate
  modified_base 18: mod_base = OTHER; note = 2'-deoxy-2'-fluoroadenosine-3'-phosphate
  modified_base 19: mod_base = OTHER; note = 2'-O-methylcytidine-3'-phosphate
  modified_base 20: mod_base = OTHER; note = 2'-O-methyladenosine-3'-phosphate
  modified_base 21: mod_base = OTHER; note = 2'-O-methyladenosine-3'-phosphate ((2S,4R)-1-[29-[[2-(acetylamino)-2-deoxy-beta-D-galactopyra nosyl]oxy]-14,14-bis[[3-[[3-[[5-[[2-(acetylamino)-2-deoxy-b eta-D-galactopyranosyl]oxy]-1-oxopentyl]amino]propyl]amino] -3-oxopropoxy]methyl]-1,12,19,25-tetraoxo-16-oxa-13,20,24-t riazanonacos-1-yl]-4-hydroxy-2-pyrrolidinyl)methyl ester
ctggtatttcctagggtacaa

SEQ ID NO: 513 - RNA, 21 nt, synthetic construct
  source 1..21: mol_type = other RNA
  modified_base 1: mod_base = OTHER; note = 2'-O-methylcytidine-3'-phosphorothioate
  modified_base 2: mod_base = OTHER; note = 2'-O-methyluridine-3'-phosphorothioate
  modified_base 3: mod_base = OTHER; note = 2'-deoxy-2'-fluoroguanosine-3'-phosphate
  modified_base 4: mod_base = OTHER; note = 2'-O-methylguanosine-3'-phosphate
  modified_base 5: mod_base = OTHER; note = 2'-O-methyluridine-3'-phosphate
  modified_base 6: mod_base = OTHER; note = 2'-O-methyladenosine-3'-phosphate
  modified_base 7: mod_base = OTHER; note = 2'-deoxy-2'-fluorouridine-3'-phosphate
  modified_base 8: mod_base = OTHER; note = 2'-O-methyluridine-3'-phosphate
  modified_base 9: mod_base = OTHER; note = 2'-deoxy-2'-fluorouridine-3'-phosphate
  modified_base 10: mod_base = OTHER; note = 2'-deoxy-2'-fluorocytidine-3'-phosphate
  modified_base 11: mod_base = OTHER; note = 2'-deoxy-2'-fluorocytidine-3'-phosphate
  modified_base 12: mod_base = OTHER; note = 2'-O-methyluridine-3'-phosphate
  modified_base 13: mod_base = OTHER; note = 2'-deoxy-2'-fluoroadenosine-3'-phosphate
  modified_base 14: mod_base = OTHER; note = 2'-O-methylguanosine-3'-phosphate
  modified_base 15: mod_base = OTHER; note = 2'-deoxy-2'-fluoroguanosine-3'-phosphate
  modified_base 16: mod_base = OTHER; note = 2'-O-methylguanosine-3'-phosphate
  modified_base 17: mod_base = OTHER; note = 2'-O-methyluridine-3'-phosphate
  modified_base 18: mod_base = OTHER; note = 2'-deoxy-2'-fluoroadenosine-3'-phosphate
  modified_base 19: mod_base = OTHER; note = 2'-O-methylcytidine-3'-phosphate
  modified_base 20: mod_base = OTHER; note = 2'-O-methyladenosine-3'-phosphate
  modified_base 21: mod_base = OTHER; note = 2'-O-methyladenosine-3'-phosphate ((2S,4R)-1-[29-[[2-(acetylamino)-2-deoxy-beta-D-galactopyra nosyl]oxy]-14,14-bis[[3-[[3-[[5-[[2-(acetylamino)-2-deoxy-b eta-D-galactopyranosyl]oxy]-1-oxopentyl]amino]propyl]amino] -3-oxopropoxy]methyl]-1,12,19,25-tetraoxo-16-oxa-13,20,24-t riazanonacos-1-yl]-4-hydroxy-2-pyrrolidinyl)methyl ester
ctggtatttcctagggtacaa

SEQ ID NO: 514 - DNA, 21 bp, synthetic construct
  source 1..21: mol_type = other DNA
  modified_base 1: mod_base = OTHER; note = 2'-O-methylcytidine-3'-phosphorothioate
  modified_base 2: mod_base = OTHER; note = 2'-O-methyluridine-3'-phosphorothioate
  modified_base 3: mod_base = OTHER; note = 2'-O-methylguanosine-3'-phosphate
  modified_base 4: mod_base = OTHER; note = 2'-O-methylguanosine-3'-phosphate
  modified_base 5: mod_base = OTHER; note = 2'-O-methyluridine-3'-phosphate
  modified_base 6: mod_base = OTHER; note = 2'-O-methyladenosine-3'-phosphate
  modified_base 7: mod_base = OTHER; note = 2'-deoxy-2'-fluorouridine-3'-phosphate
  modified_base 8: mod_base = OTHER; note = 2'-O-methyluridine-3'-phosphate
  modified_base 9: mod_base = OTHER; note = 2'-deoxy-2'-fluorouridine-3'-phosphate
  modified_base 10: mod_base = OTHER; note = 2'-deoxy-2'-fluorocytidine-3'-phosphate
  modified_base 12: mod_base = OTHER; note = 2'-O-methyluridine-3'-phosphate
  modified_base 13: mod_base = OTHER; note = 2'-O-methyladenosine-3'-phosphate
  modified_base 14: mod_base = OTHER; note = 2'-O-methylguanosine-3'-phosphate
  modified_base 15: mod_base = OTHER; note = 2'-O-methylguanosine-3'-phosphate
  modified_base 16: mod_base = OTHER; note = 2'-deoxy-2'-fluoroguanosine-3'-phosphate
  modified_base 17: mod_base = OTHER; note = 2'-O-methyluridine-3'-phosphate
  modified_base 18: mod_base = OTHER; note = 2'-O-methyladenosine-3'-phosphate
  modified_base 19: mod_base = OTHER; note = 2'-O-methylcytidine-3'-phosphate
  modified_base 20: mod_base = OTHER; note = 2'-O-methyladenosine-3'-phosphate
  modified_base 21: mod_base = OTHER; note = 2'-O-methyladenosine-3'-phosphate ((2S,4R)-1-[29-[[2-(acetylamino)-2-deoxy-beta-D-galactopyra nosyl]oxy]-14,14-bis[[3-[[3-[[5-[[2-(acetylamino)-2-deoxy-b eta-D-galactopyranosyl]oxy]-1-oxopentyl]amino]propyl]amino] -3-oxopropoxy]methyl]-1,12,19,25-tetraoxo-16-oxa-13,20,24-t riazanonacos-1-yl]-4-hydroxy-2-pyrrolidinyl)methyl ester
  misc_feature 1..10: note = RNA
  misc_feature 12..21: note = RNA
  misc_feature 11: note = DNA
ctggtatttcctagggtacaa

SEQ ID NO: 515 - RNA, 21 nt, synthetic construct
  source 1..21: mol_type = other RNA
  modified_base 1: mod_base = OTHER; note = 2'-deoxy-2'-fluorocytidine-3'-phosphorothioate
  modified_base 2: mod_base = OTHER; note = 2'-O-methyluridine-3'-phosphorothioate
  modified_base 3: mod_base = OTHER; note = 2'-deoxy-2'-fluoroguanosine-3'-phosphate
  modified_base 4: mod_base = OTHER; note = 2'-O-methylguanosine-3'-phosphate
  modified_base 5: mod_base = OTHER; note = 2'-deoxy-2'-fluorouridine-3'-phosphate
  modified_base 6: mod_base = OTHER; note = 2'-O-methyladenosine-3'-phosphate
  modified_base 7: mod_base = OTHER; note = 2'-deoxy-2'-fluorouridine-3'-phosphate
  modified_base 8: mod_base = OTHER; note = 2'-O-methyluridine-3'-phosphate
  modified_base 9: mod_base = OTHER; note = 2'-deoxy-2'-fluorouridine-3'-phosphate
  modified_base 10: mod_base = OTHER; note = 2'-deoxy-2'-fluorocytidine-3'-phosphate
  modified_base 11: mod_base = OTHER; note = 2'-deoxy-2'-fluorocytidine-3'-phosphate
  modified_base 12: mod_base = OTHER; note = 2'-O-methyluridine-3'-phosphate
  modified_base 13: mod_base = OTHER; note = 2'-deoxy-2'-fluoroadenosine-3'-phosphate
  modified_base 14: mod_base = OTHER; note = 2'-O-methylguanosine-3'-phosphate
  modified_base 15: mod_base = OTHER; note = 2'-deoxy-2'-fluoroguanosine-3'-phosphate
  modified_base 16: mod_base = OTHER; note = 2'-O-methylguanosine-3'-phosphate
  modified_base 17: mod_base = OTHER; note = 2'-deoxy-2'-fluorouridine-3'-phosphate
  modified_base 18: mod_base = OTHER; note = 2'-O-methyladenosine-3'-phosphate
  modified_base 19: mod_base = OTHER; note = 2'-deoxy-2'-fluorocytidine-3'-phosphate
  modified_base 20: mod_base = OTHER; note = 2'-O-methyladenosine-3'-phosphate
  modified_base 21: mod_base = OTHER; note = 2'-deoxy-2'-fluoroadenosine-3'-phosphate ((2S,4R)-1-[29-[[2-(acetylamino)-2-deoxy-beta-D-galactopyra nosyl]oxy]-14,14-bis[[3-[[3-[[5-[[2-(acetylamino)-2-deoxy-b eta-D-galactopyranosyl]oxy]-1-oxopentyl]amino]propyl]amino] -3-oxopropoxy]methyl]-1,12,19,25-tetraoxo-16-oxa-13,20,24-t riazanonacos-1-yl]-4-hydroxy-2-pyrrolidinyl)methyl ester
ctggtatttcctagggtacaa

SEQ ID NO: 516 - RNA, 21 nt, synthetic construct
  source 1..21: mol_type = other RNA
  modified_base 1: mod_base = OTHER; note = 2'-O-methylcytidine-3'-phosphorothioate
  modified_base 2: mod_base = OTHER; note = 2'-O-methyluridine-3'-phosphorothioate
  modified_base 3: mod_base = OTHER; note = 2'-O-methylguanosine-3'-phosphate
  modified_base 4: mod_base = OTHER; note = 2'-O-methylguanosine-3'-phosphate
  modified_base 5: mod_base = OTHER; note = 2'-O-methyluridine-3'-phosphate
  modified_base 6: mod_base = OTHER; note = 2'-deoxy-2'-fluoroadenosine-3'-phosphate
  modified_base 7: mod_base = OTHER; note = 2'-O-methyluridine-3'-phosphate
  modified_base 8: mod_base = OTHER; note = 2'-O-methyluridine-3'-phosphate
  modified_base 9: mod_base = OTHER; note = 2'-deoxy-2'-fluorouridine-3'-phosphate
  modified_base 10: mod_base = OTHER; note = 2'-O-methylcytidine-3'-phosphate
  modified_base 11: mod_base = OTHER; note = 2'-deoxy-2'-fluorocytidine-3'-phosphate
  modified_base 12: mod_base = OTHER; note = 2'-deoxy-2'-fluorouridine-3'-phosphate
  modified_base 13: mod_base = OTHER; note = 2'-O-methyladenosine-3'-phosphate
  modified_base 14: mod_base = OTHER; note = 2'-O-methylguanosine-3'-phosphate
  modified_base 15: mod_base = OTHER; note = 2'-deoxy-2'-fluoroguanosine-3'-phosphate
  modified_base 16: mod_base = OTHER; note = 2'-deoxy-2'-fluoroguanosine-3'-phosphate
  modified_base 17: mod_base = OTHER; note = 2'-O-methyluridine-3'-phosphate
  modified_base 18: mod_base = OTHER; note = 2'-O-methyladenosine-3'-phosphate
  modified_base 19: mod_base = OTHER; note = 2'-O-methylcytidine-3'-phosphate
  modified_base 20: mod_base = OTHER; note = 2'-O-methyladenosine-3'-phosphate
  modified_base 21: mod_base = OTHER; note = 2'-O-methyladenosine-3'-phosphate ((2S,4R)-1-[29-[[2-(acetylamino)-2-deoxy-beta-D-galactopyra nosyl]oxy]-14,14-bis[[3-[[3-[[5-[[2-(acetylamino)-2-deoxy-b eta-D-galactopyranosyl]oxy]-1-oxopentyl]amino]propyl]amino] -3-oxopropoxy]methyl]-1,12,19,25-tetraoxo-16-oxa-13,20,24-t riazanonacos-1-yl]-4-hydroxy-2-pyrrolidinyl)methyl ester
ctggtatttcctagggtacaa

SEQ ID NO: 517 - DNA, 21 bp, synthetic construct
  source 1..21: mol_type = other DNA
  modified_base 1: mod_base = OTHER; note = 2'-O-methylcytidine-3'-phosphorothioate
  modified_base 2: mod_base = OTHER; note = 2'-O-methyluridine-3'-phosphorothioate
  modified_base 3: mod_base = OTHER; note = 2'-O-methylguanosine-3'-phosphate
  modified_base 4: mod_base = OTHER; note = 2'-O-methylguanosine-3'-phosphate
  modified_base 5: mod_base = OTHER; note = 2'-O-methyluridine-3'-phosphate
  modified_base 6: mod_base = OTHER; note = 2'-O-methyladenosine-3'-phosphate
  modified_base 7: mod_base = OTHER; note = 2'-deoxy-2'-fluorouridine-3'-phosphate
  modified_base 8: mod_base = OTHER; note = 2'-O-methyluridine-3'-phosphate
  modified_base 9: mod_base = OTHER; note = 2'-deoxy-2'-fluorouridine-3'-phosphate
  modified_base 10: mod_base = OTHER; note = 2'-deoxy-2'-fluorocytidine-3'-phosphate
  modified_base 11: mod_base = OTHER; note = 2'-deoxy-2'-fluorocytidine-3'-phosphate
  modified_base 12: mod_base = OTHER; note = 2'-O-methyluridine-3'-phosphate
  modified_base 13: mod_base = OTHER; note = 2'-O-methyladenosine-3'-phosphate
  modified_base 14: mod_base = OTHER; note = 2'-O-methylguanosine-3'-phosphate
  modified_base 15: mod_base = OTHER; note = 2'-O-methylguanosine-3'-phosphate
  modified_base 16: mod_base = OTHER; note = 2'-deoxy-2'-fluoroguanosine-3'-phosphate
  modified_base 18: mod_base = OTHER; note = 2'-O-methyladenosine-3'-phosphate
  modified_base 19: mod_base = OTHER; note = 2'-O-methylcytidine-3'-phosphate
  modified_base 20: mod_base = OTHER; note = 2'-O-methyladenosine-3'-phosphate
  modified_base 21: mod_base = OTHER; note = 2'-O-methyladenosine-3'-phosphate ((2S,4R)-1-[29-[[2-(acetylamino)-2-deoxy-beta-D-galactopyra nosyl]oxy]-14,14-bis[[3-[[3-[[5-[[2-(acetylamino)-2-deoxy-b eta-D-galactopyranosyl]oxy]-1-oxopentyl]amino]propyl]amino] -3-oxopropoxy]methyl]-1,12,19,25-tetraoxo-16-oxa-13,20,24-t riazanonacos-1-yl]-4-hydroxy-2-pyrrolidinyl)methyl ester
  misc_feature 1..16: note = RNA
  misc_feature 18..21: note = RNA
  misc_feature 17: note = DNA
ctggtatttcctagggtacaa

SEQ ID NO: 518 - RNA, 21 nt, synthetic construct
  source 1..21: mol_type = other RNA
  modified_base 1: mod_base = OTHER; note = 2'-O-methylcytidine-3'-phosphorothioate
  modified_base 2: mod_base = OTHER; note = 2'-O-methyluridine-3'-phosphorothioate
  modified_base 3: mod_base = OTHER; note = 2'-deoxy-2'-fluoroguanosine-3'-phosphate
  modified_base 4: mod_base = OTHER; note = 2'-O-methylguanosine-3'-phosphate
  modified_base 5: mod_base = OTHER; note = 2'-O-methyluridine-3'-phosphate
  modified_base 6: mod_base = OTHER; note = 2'-O-methyladenosine-3'-phosphate
  modified_base 7: mod_base = OTHER; note = 2'-deoxy-2'-fluorouridine-3'-phosphate
  modified_base 8: mod_base = OTHER; note = 2'-O-methyluridine-3'-phosphate
  modified_base 9: mod_base = OTHER; note = 2'-deoxy-2'-fluorouridine-3'-phosphate
  modified_base 10: mod_base = OTHER; note = 2'-deoxy-2'-fluorocytidine-3'-phosphate
  modified_base 11: mod_base = OTHER; note = 2'-deoxy-2'-fluorocytidine-3'-phosphate
  modified_base 12: mod_base = OTHER; note = 2'-O-methyluridine-3'-phosphate
  modified_base 13: mod_base = OTHER; note = 2'-deoxy-2'-fluoroadenosine-3'-phosphate
  modified_base 14: mod_base = OTHER; note = 2'-O-methylguanosine-3'-phosphate
  modified_base 15: mod_base = OTHER; note = 2'-deoxy-2'-fluoroguanosine-3'-phosphate
  modified_base 16: mod_base = OTHER; note = 2'-O-methylguanosine-3'-phosphate
  modified_base 17: mod_base = OTHER; note = 2'-O-methyluridine-3'-phosphate
  modified_base 18: mod_base = OTHER; note = 2'-deoxy-2'-fluoroadenosine-3'-phosphate
  modified_base 19: mod_base = OTHER; note = 2'-O-methylcytidine-3'-phosphate
  modified_base 20: mod_base = OTHER; note = 2'-O-methyladenosine-3'-phosphate
  modified_base 21: mod_base = OTHER; note = 2'-O-methyladenosine-3'-phosphate ((2S,4R)-1-[29-[[2-(acetylamino)-2-deoxy-beta-D-galactopyra nosyl]oxy]-14,14-bis[[3-[[3-[[5-[[2-(acetylamino)-2-deoxy-b eta-D-galactopyranosyl]oxy]-1-oxopentyl]amino]propyl]amino] -3-oxopropoxy]methyl]-1,12,19,25-tetraoxo-16-oxa-13,20,24-t riazanonacos-1-yl]-4-hydroxy-2-pyrrolidinyl)methyl ester
ctggtatttcctagggtacaa

SEQ ID NO: 519 - RNA, 21 nt, synthetic construct
  source 1..21: mol_type = other RNA
  modified_base 1: mod_base = OTHER; note = 2'-O-methylcytidine-3'-phosphorothioate
  modified_base 2: mod_base = OTHER; note = 2'-O-methyluridine-3'-phosphorothioate
  modified_base 3: mod_base = OTHER; note = 2'-deoxy-2'-fluoroguanosine-3'-phosphate
  modified_base 4: mod_base = OTHER; note = 2'-O-methylguanosine-3'-phosphate
  modified_base 5: mod_base = OTHER; note = 2'-O-methyluridine-3'-phosphate
  modified_base 6: mod_base = OTHER; note = 2'-O-methyladenosine-3'-phosphate
  modified_base 7: mod_base = OTHER; note = 2'-deoxy-2'-fluorouridine-3'-phosphate
  modified_base 8: mod_base = OTHER; note = 2'-O-methyluridine-3'-phosphate
  modified_base 9: mod_base = OTHER; note = 2'-deoxy-2'-fluorouridine-3'-phosphate
  modified_base 10: mod_base = OTHER; note = 2'-deoxy-2'-fluorocytidine-3'-phosphate
  modified_base 11: mod_base = OTHER; note = 2'-deoxy-2'-fluorocytidine-3'-phosphate
  modified_base 12: mod_base = OTHER; note = 2'-O-methyluridine-3'-phosphate
  modified_base 13: mod_base = OTHER; note = 2'-deoxy-2'-fluoroadenosine-3'-phosphate
  modified_base 14: mod_base = OTHER; note = 2'-O-methylguanosine-3'-phosphate
  modified_base 15: mod_base = OTHER; note = 2'-deoxy-2'-fluoroguanosine-3'-phosphate
  modified_base 16: mod_base = OTHER; note = 2'-O-methylguanosine-3'-phosphate
  modified_base 17: mod_base = OTHER; note = 2'-O-methyluridine-3'-phosphate
  modified_base 18: mod_base = OTHER; note = 2'-deoxy-2'-fluoroadenosine-3'-phosphate
  modified_base 19: mod_base = OTHER; note = 2'-O-methylcytidine-3'-phosphate
  modified_base 20: mod_base = OTHER; note = 2'-O-methyladenosine-3'-phosphate
  modified_base 21: mod_base = OTHER; note = 2'-O-methyladenosine-3'-phosphate ((2S,4R)-1-[29-[[2-(acetylamino)-2-deoxy-beta-D-galactopyra nosyl]oxy]-14,14-bis[[3-[[3-[[5-[[2-(acetylamino)-2-deoxy-b eta-D-galactopyranosyl]oxy]-1-oxopentyl]amino]propyl]amino] -3-oxopropoxy]methyl]-1,12,19,25-tetraoxo-16-oxa-13,20,24-t riazanonacos-1-yl]-4-hydroxy-2-pyrrolidinyl)methyl ester
ctggtatttcctagggtacaa

SEQ ID NO: 520 - RNA, 21 nt, synthetic construct
  source 1..21: mol_type = other RNA
  modified_base 1: mod_base = OTHER; note = 2'-deoxy-2'-fluorocytidine-3'-phosphorothioate
  modified_base 2: mod_base = OTHER; note = 2'-O-methyluridine-3'-phosphorothioate
  modified_base 3: mod_base = OTHER; note = 2'-deoxy-2'-fluoroguanosine-3'-phosphate
  modified_base 4: mod_base = OTHER; note = 2'-O-methylguanosine-3'-phosphate
  modified_base 5: mod_base = OTHER; note = 2'-deoxy-2'-fluorouridine-3'-phosphate
  modified_base 6: mod_base = OTHER; note = 2'-O-methyladenosine-3'-phosphate
  modified_base 7: mod_base = OTHER; note = 2'-deoxy-2'-fluorouridine-3'-phosphate
  modified_base 8: mod_base = OTHER; note = 2'-O-methyluridine-3'-phosphate
  modified_base 9: mod_base = OTHER; note = 2'-deoxy-2'-fluorouridine-3'-phosphate
  modified_base 10: mod_base = OTHER; note = 2'-deoxy-2'-fluorocytidine-3'-phosphate
  modified_base 11: mod_base = OTHER; note = 2'-deoxy-2'-fluorocytidine-3'-phosphate
  modified_base 12: mod_base = OTHER; note = 2'-O-methyluridine-3'-phosphate
  modified_base 13: mod_base = OTHER; note = 2'-deoxy-2'-fluoroadenosine-3'-phosphate
  modified_base 14: mod_base = OTHER; note = 2'-O-methylguanosine-3'-phosphate
  modified_base 15: mod_base = OTHER; note = 2'-deoxy-2'-fluoroguanosine-3'-phosphate
  modified_base 16: mod_base = OTHER; note = 2'-O-methylguanosine-3'-phosphate
  modified_base 17: mod_base = OTHER; note = 2'-deoxy-2'-fluorouridine-3'-phosphate
  modified_base 18: mod_base = OTHER; note = 2'-O-methyladenosine-3'-phosphate
  modified_base 19: mod_base = OTHER; note = 2'-deoxy-2'-fluorocytidine-3'-phosphate
  modified_base 20: mod_base = OTHER; note = 2'-O-methyladenosine-3'-phosphate
  modified_base 21: mod_base = OTHER; note = 2'-deoxy-2'-fluoroadenosine-3'-phosphate ((2S,4R)-1-[29-[[2-(acetylamino)-2-deoxy-beta-D-galactopyra nosyl]oxy]-14,14-bis[[3-[[3-[[5-[[2-(acetylamino)-2-deoxy-b eta-D-galactopyranosyl]oxy]-1-oxopentyl]amino]propyl]amino] -3-oxopropoxy]methyl]-1,12,19,25-tetraoxo-16-oxa-13,20,24-t riazanonacos-1-yl]-4-hydroxy-2-pyrrolidinyl)methyl ester
ctggtatttcctagggtacaa

SEQ ID NO: 521 - RNA, 21 nt, synthetic construct
  source 1..21: mol_type = other RNA
  modified_base 1: mod_base = OTHER; note = 2'-deoxy-2'-fluorocytidine-3'-phosphorothioate
  modified_base 2: mod_base = OTHER; note = 2'-O-methyluridine-3'-phosphorothioate
  modified_base 3: mod_base = OTHER; note = 2'-deoxy-2'-fluoroguanosine-3'-phosphate
  modified_base 4: mod_base = OTHER; note = 2'-O-methylguanosine-3'-phosphate
  modified_base 5: mod_base = OTHER; note = 2'-deoxy-2'-fluorouridine-3'-phosphate
  modified_base 6: mod_base = OTHER; note = 2'-O-methyladenosine-3'-phosphate
  modified_base 7: mod_base = OTHER; note = 2'-deoxy-2'-fluorouridine-3'-phosphate
  modified_base 8: mod_base = OTHER; note = 2'-O-methyluridine-3'-phosphate
  modified_base 9: mod_base = OTHER; note = 2'-deoxy-2'-fluorouridine-3'-phosphate
  modified_base 10: mod_base = OTHER; note = 2'-deoxy-2'-fluorocytidine-3'-phosphate
  modified_base 11: mod_base = OTHER; note = 2'-deoxy-2'-fluorocytidine-3'-phosphate
  modified_base 12: mod_base = OTHER; note = 2'-O-methyluridine-3'-phosphate
  modified_base 13: mod_base = OTHER; note = 2'-deoxy-2'-fluoroadenosine-3'-phosphate
  modified_base 14: mod_base = OTHER; note = 2'-O-methylguanosine-3'-phosphate
  modified_base 15: mod_base = OTHER; note = 2'-deoxy-2'-fluoroguanosine-3'-phosphate
  modified_base 16: mod_base = OTHER; note = 2'-O-methylguanosine-3'-phosphate
  modified_base 17: mod_base = OTHER; note = 2'-deoxy-2'-fluorouridine-3'-phosphate
  modified_base 18: mod_base = OTHER; note = 2'-O-methyladenosine-3'-phosphate
  modified_base 19: mod_base = OTHER; note = 2'-deoxy-2'-fluorocytidine-3'-phosphate
  modified_base 20: mod_base = OTHER; note = 2'-O-methyladenosine-3'-phosphate
  modified_base 21: mod_base = OTHER; note = 2'-deoxy-2'-fluoroadenosine-3'-phosphate ((2S,4R)-1-[29-[[2-(acetylamino)-2-deoxy-beta-D-galactopyra nosyl]oxy]-14,14-bis[[3-[[3-[[5-[[2-(acetylamino)-2-deoxy-b eta-D-galactopyranosyl]oxy]-1-oxopentyl]amino]propyl]amino] -3-oxopropoxy]methyl]-1,12,19,25-tetraoxo-16-oxa-13,20,24-t riazanonacos-1-yl]-4-hydroxy-2-pyrrolidinyl)methyl ester
ctggtatttcctagggtacaa

SEQ ID NO: 522 - DNA, 21 bp, synthetic construct
  source 1..21: mol_type = other DNA
  modified_base 1: mod_base = OTHER; note = 2'-O-methylcytidine-3'-phosphorothioate
  modified_base 2: mod_base = OTHER; note = 2'-O-methyluridine-3'-phosphorothioate
  modified_base 3: mod_base = OTHER; note = 2'-O-methylguanosine-3'-phosphate
  modified_base 4: mod_base = OTHER; note = 2'-O-methylguanosine-3'-phosphate
  modified_base 5: mod_base = OTHER; note = 2'-O-methyluridine-3'-phosphate
  modified_base 6: mod_base = OTHER; note = 2'-O-methyladenosine-3'-phosphate
  modified_base 7: mod_base = OTHER; note = 2'-deoxy-2'-fluorouridine-3'-phosphate
  modified_base 8: mod_base = OTHER; note = 2'-O-methyluridine-3'-phosphate
  modified_base 9: mod_base = OTHER; note = 2'-deoxy-2'-fluorouridine-3'-phosphate
  modified_base 10: mod_base = OTHER; note = 2'-deoxy-2'-fluorocytidine-3'-phosphate
  modified_base 11: mod_base = OTHER; note = 2'-deoxy-2'-fluorocytidine-3'-phosphate
  modified_base 12: mod_base = OTHER; note = 2'-O-methyluridine-3'-phosphate
  modified_base 13: mod_base = OTHER; note = 2'-O-methyladenosine-3'-phosphate
  modified_base 14: mod_base = OTHER; note = 2'-O-methylguanosine-3'-phosphate
  modified_base 15: mod_base = OTHER; note = 2'-O-methylguanosine-3'-phosphate
  modified_base 16: mod_base = OTHER; note = 2'-deoxy-2'-fluoroguanosine-3'-phosphate
  modified_base 17: mod_base = OTHER; note = 2'-O-methyluridine-3'-phosphate
  modified_base 18: mod_base = OTHER; note = 2'-O-methyladenosine-3'-phosphate
  modified_base 20: mod_base = OTHER; note = 2'-O-methyladenosine-3'-phosphate
  modified_base 21: mod_base = OTHER; note = 2'-O-methyladenosine-3'-phosphate ((2S,4R)-1-[29-[[2-(acetylamino)-2-deoxy-beta-D-galactopyra nosyl]oxy]-14,14-bis[[3-[[3-[[5-[[2-(acetylamino)-2-deoxy-b eta-D-galactopyranosyl]oxy]-1-oxopentyl]amino]propyl]amino] -3-oxopropoxy]methyl]-1,12,19,25-tetraoxo-16-oxa-13,20,24-t riazanonacos-1-yl]-4-hydroxy-2-pyrrolidinyl)methyl ester
  misc_feature 1..18: note = RNA
  misc_feature 20..21: note = RNA
  misc_feature 19: note = DNA
ctggtatttcctagggtacaa

SEQ ID NO: 523 - DNA, 21 bp, synthetic construct
  source 1..21: mol_type = other DNA
  modified_base 1: mod_base = OTHER; note = 2'-O-methylcytidine-3'-phosphorothioate
  modified_base 2: mod_base = OTHER; note = 2'-O-methyluridine-3'-phosphorothioate
  modified_base 3: mod_base = OTHER; note = 2'-O-methylguanosine-3'-phosphate
  modified_base 4: mod_base = OTHER; note = 2'-O-methylguanosine-3'-phosphate
  modified_base 5: mod_base = OTHER; note = 2'-O-methyluridine-3'-phosphate
  modified_base 6: mod_base = OTHER; note = 2'-O-methyladenosine-3'-phosphate
  modified_base 7: mod_base = OTHER; note = 2'-O-methyluridine-3'-phosphate
  modified_base 8: mod_base = OTHER; note = 2'-O-methyluridine-3'-phosphate
  modified_base 9: mod_base = OTHER; note = 2'-O-methyluridine-3'-phosphate
  modified_base 10: mod_base = OTHER; note = 2'-O-methylcytidine-3'-phosphate
  modified_base 12: mod_base = OTHER; note = 2'-O-methyluridine-3'-phosphate
  modified_base 13: mod_base = OTHER; note = 2'-O-methyladenosine-3'-phosphate
  modified_base 14: mod_base = OTHER; note = 2'-O-methylguanosine-3'-phosphate
  modified_base 15: mod_base = OTHER; note = 2'-O-methylguanosine-3'-phosphate
  modified_base 16: mod_base = OTHER; note = 2'-O-methylguanosine-3'-phosphate
  modified_base 17: mod_base = OTHER; note = Thymidine-glycol nucleic acid (GNA), S-Isomer
  modified_base 18: mod_base = OTHER; note = 2'-O-methyladenosine-3'-phosphate
  modified_base 19: mod_base = OTHER; note = 2'-O-methylcytidine-3'-phosphate
  modified_base 20: mod_base = OTHER; note = 2'-O-methyladenosine-3'-phosphate
  modified_base 21: mod_base = OTHER; note = 2'-O-methyladenosine-3'-phosphate ((2S,4R)-1-[29-[[2-(acetylamino)-2-deoxy-beta-D-galactopyra nosyl]oxy]-14,14-bis[[3-[[3-[[5-[[2-(acetylamino)-2-deoxy-b eta-D-galactopyranosyl]oxy]-1-oxopentyl]amino]propyl]amino] -3-oxopropoxy]methyl]-1,12,19,25-tetraoxo-16-oxa-13,20,24-t riazanonacos-1-yl]-4-hydroxy-2-pyrrolidinyl)methyl ester
  misc_feature 1..10: note = RNA
  misc_feature 12..21: note = RNA
  misc_feature 11: note = DNA
ctggtatttcctagggtacaa

SEQ ID NO: 524 - RNA, 21 nt, synthetic construct
  source 1..21: mol_type = other RNA
  modified_base 1: mod_base = OTHER; note = 2'-O-methylcytidine-3'-phosphorothioate
  modified_base 2: mod_base = OTHER; note = 2'-O-methyluridine-3'-phosphorothioate
  modified_base 3: mod_base = OTHER; note = 2'-deoxy-2'-fluoroguanosine-3'-phosphate
  modified_base 4: mod_base = OTHER; note = 2'-O-methylguanosine-3'-phosphate
  modified_base 5: mod_base = OTHER; note = 2'-O-methyluridine-3'-phosphate
  modified_base 6: mod_base = OTHER; note = 2'-O-methyladenosine-3'-phosphate
  modified_base 7: mod_base = OTHER; note = 2'-deoxy-2'-fluorouridine-3'-phosphate
  modified_base 8: mod_base = OTHER; note = 2'-O-methyluridine-3'-phosphate
  modified_base 9: mod_base = OTHER; note = 2'-deoxy-2'-fluorouridine-3'-phosphate
  modified_base 10: mod_base = OTHER; note = 2'-deoxy-2'-fluorocytidine-3'-phosphate
  modified_base 11: mod_base = OTHER; note = 2'-deoxy-2'-fluorocytidine-3'-phosphate
  modified_base 12: mod_base = OTHER; note = 2'-O-methyluridine-3'-phosphate
  modified_base 13: mod_base = OTHER; note = 2'-deoxy-2'-fluoroadenosine-3'-phosphate
  modified_base 14: mod_base = OTHER; note = 2'-O-methylguanosine-3'-phosphate
  modified_base 15: mod_base = OTHER; note = 2'-deoxy-2'-fluoroguanosine-3'-phosphate
  modified_base 16: mod_base = OTHER; note = 2'-O-methylguanosine-3'-phosphate
  modified_base 17: mod_base = OTHER; note = 2'-O-methyluridine-3'-phosphate
  modified_base 18: mod_base = OTHER; note = 2'-deoxy-2'-fluoroadenosine-3'-phosphate
  modified_base 19: mod_base = OTHER; note = 2'-O-methylcytidine-3'-phosphate
  modified_base 20: mod_base = OTHER; note = 2'-O-methyladenosine-3'-phosphate
  modified_base 21: mod_base = OTHER; note = 2'-O-methyladenosine-3'-phosphate ((2S,4R)-1-[29-[[2-(acetylamino)-2-deoxy-beta-D-galactopyra nosyl]oxy]-14,14-bis[[3-[[3-[[5-[[2-(acetylamino)-2-deoxy-b eta-D-galactopyranosyl]oxy]-1-oxopentyl]amino]propyl]amino] -3-oxopropoxy]methyl]-1,12,19,25-tetraoxo-16-oxa-13,20,24-t riazanonacos-1-yl]-4-hydroxy-2-pyrrolidinyl)methyl ester
ctggtatttcctagggtacaa

SEQ ID NO: 525 - RNA, 21 nt, synthetic construct
  source 1..21: mol_type = other RNA
  modified_base 1: mod_base = OTHER; note = 2'-O-methylcytidine-3'-phosphorothioate
  modified_base 2: mod_base = OTHER; note = 2'-O-methyluridine-3'-phosphorothioate
  modified_base 3: mod_base = OTHER; note = 2'-O-methylguanosine-3'-phosphate
  modified_base 4: mod_base = OTHER; note = 2'-O-methylguanosine-3'-phosphate
  modified_base 5: mod_base = OTHER; note = 2'-O-methyluridine-3'-phosphate
  modified_base 6: mod_base = OTHER; note = 2'-deoxy-2'-fluoroadenosine-3'-phosphate
  modified_base 7: mod_base = OTHER; note = 2'-O-methyluridine-3'-phosphate
  modified_base 8: mod_base = OTHER; note = 2'-O-methyluridine-3'-phosphate
  modified_base 9: mod_base = OTHER; note = 2'-O-methyluridine-3'-phosphate
  modified_base 10: mod_base = OTHER; note = 2'-deoxy-2'-fluorocytidine-3'-phosphate
  modified_base 11: mod_base = OTHER; note = 2'-deoxy-2'-fluorocytidine-3'-phosphate
  modified_base 12: mod_base = OTHER; note = 2'-O-methyluridine-3'-phosphate
  modified_base 13: mod_base = OTHER; note = 2'-deoxy-2'-fluoroadenosine-3'-phosphate
  modified_base 14: mod_base = OTHER; note = 2'-O-methylguanosine-3'-phosphate
  modified_base 15: mod_base = OTHER; note = 2'-O-methylguanosine-3'-phosphate
  modified_base 16: mod_base = OTHER; note = 2'-deoxy-2'-fluoroguanosine-3'-phosphate
  modified_base 17: mod_base = OTHER; note = 2'-O-methyluridine-3'-phosphate
  modified_base 18: mod_base = OTHER; note = 2'-O-methyladenosine-3'-phosphate
  modified_base 19: mod_base = OTHER; note = 2'-O-methylcytidine-3'-phosphate
  modified_base 20: mod_base = OTHER; note = 2'-O-methyladenosine-3'-phosphate
  modified_base 21: mod_base = OTHER; note = 2'-O-methyladenosine-3'-phosphate ((2S,4R)-1-[29-[[2-(acetylamino)-2-deoxy-beta-D-galactopyra nosyl]oxy]-14,14-bis[[3-[[3-[[5-[[2-(acetylamino)-2-deoxy-b eta-D-galactopyranosyl]oxy]-1-oxopentyl]amino]propyl]amino] -3-oxopropoxy]methyl]-1,12,19,25-tetraoxo-16-oxa-13,20,24-t riazanonacos-1-yl]-4-hydroxy-2-pyrrolidinyl)methyl ester
ctggtatttcctagggtacaa

SEQ ID NO: 526 - RNA, 21 nt, synthetic construct
  source 1..21: mol_type = other RNA
  modified_base 1: mod_base = OTHER; note = 2'-O-methylcytidine-3'-phosphorothioate
  modified_base 2: mod_base = OTHER; note = 2'-O-methyluridine-3'-phosphorothioate
  modified_base 3: mod_base = OTHER; note = 2'-deoxy-2'-fluoroguanosine-3'-phosphate
  modified_base 4: mod_base = OTHER; note = 2'-O-methylguanosine-3'-phosphate
  modified_base 5: mod_base = OTHER; note = 2'-O-methyluridine-3'-phosphate
  modified_base 6: mod_base = OTHER; note = 2'-O-methyladenosine-3'-phosphate
  modified_base 7: mod_base = OTHER; note = 2'-deoxy-2'-fluorouridine-3'-phosphate
  modified_base 8: mod_base = OTHER; note = 2'-O-methyluridine-3'-phosphate
  modified_base 9: mod_base = OTHER; note = 2'-deoxy-2'-fluorouridine-3'-phosphate
  modified_base 10: mod_base = OTHER; note = 2'-deoxy-2'-fluorocytidine-3'-phosphate
  modified_base 11: mod_base = OTHER; note = 2'-deoxy-2'-fluorocytidine-3'-phosphate
  modified_base 12: mod_base = OTHER; note = 2'-O-methyluridine-3'-phosphate
  modified_base 13: mod_base = OTHER; note = 2'-deoxy-2'-fluoroadenosine-3'-phosphate
  modified_base 14: mod_base = OTHER; note = 2'-O-methylguanosine-3'-phosphate
  modified_base 15: mod_base = OTHER; note = 2'-deoxy-2'-fluoroguanosine-3'-phosphate
  modified_base 16: mod_base = OTHER; note = 2'-O-methylguanosine-3'-phosphate
  modified_base 17: mod_base = OTHER; note = 2'-O-methyluridine-3'-phosphate
  modified_base 18: mod_base = OTHER; note = 2'-deoxy-2'-fluoroadenosine-3'-phosphate
  modified_base 19: mod_base = OTHER; note = 2'-O-methylcytidine-3'-phosphate
  modified_base 20: mod_base = OTHER; note = 2'-O-methyladenosine-3'-phosphate
  modified_base 21: mod_base = OTHER; note = 2'-O-methyladenosine-3'-phosphate ((2S,4R)-1-[29-[[2-(acetylamino)-2-deoxy-beta-D-galactopyra nosyl]oxy]-14,14-bis[[3-[[3-[[5-[[2-(acetylamino)-2-deoxy-b eta-D-galactopyranosyl]oxy]-1-oxopentyl]amino]propyl]amino] -3-oxopropoxy]methyl]-1,12,19,25-tetraoxo-16-oxa-13,20,24-t riazanonacos-1-yl]-4-hydroxy-2-pyrrolidinyl)methyl ester
ctggtatttcctagggtacaa

SEQ ID NO: 527 - DNA, 21 bp, synthetic construct
  source 1..21: mol_type = other DNA
  modified_base 1: mod_base = OTHER; note = 2'-O-methylcytidine-3'-phosphorothioate
  modified_base 2: mod_base = OTHER; note = 2'-O-methyluridine-3'-phosphorothioate
  modified_base 3: mod_base = OTHER; note = 2'-O-methylguanosine-3'-phosphate
  modified_base 4: mod_base = OTHER; note = 2'-O-methylguanosine-3'-phosphate
  modified_base 5: mod_base = OTHER; note = 2'-O-methyluridine-3'-phosphate
  modified_base 6: mod_base = OTHER; note = 2'-deoxy-2'-fluoroadenosine-3'-phosphate
  modified_base 7: mod_base = OTHER; note = 2'-O-methyluridine-3'-phosphate
  modified_base 8: mod_base = OTHER; note = 2'-O-methyluridine-3'-phosphate
  modified_base 9: mod_base = OTHER; note = 2'-O-methyluridine-3'-phosphate
  modified_base 10: mod_base = OTHER; note = 2'-O-methylcytidine-3'-phosphate
  modified_base 11: mod_base = OTHER; note = 2'-deoxy-2'-fluorocytidine-3'-phosphate
  modified_base 12: mod_base = OTHER; note = 2'-O-methyluridine-3'-phosphate
  modified_base 13: mod_base = OTHER; note = 2'-O-methyladenosine-3'-phosphate
  modified_base 14: mod_base = OTHER; note = 2'-O-methylguanosine-3'-phosphate
  modified_base 15: mod_base = OTHER; note = 2'-O-methylguanosine-3'-phosphate
  modified_base 16: mod_base = OTHER; note = 2'-O-methylguanosine-3'-phosphate
  modified_base 18: mod_base = OTHER; note = 2'-O-methyladenosine-3'-phosphate
  modified_base 19: mod_base = OTHER; note = 2'-O-methylcytidine-3'-phosphate
  modified_base 20: mod_base = OTHER; note = 2'-O-methyladenosine-3'-phosphate
  modified_base 21: mod_base = OTHER; note = 2'-O-methyladenosine-3'-phosphate ((2S,4R)-1-[29-[[2-(acetylamino)-2-deoxy-beta-D-galactopyra nosyl]oxy]-14,14-bis[[3-[[3-[[5-[[2-(acetylamino)-2-deoxy-b eta-D-galactopyranosyl]oxy]-1-oxopentyl]amino]propyl]amino] -3-oxopropoxy]methyl]-1,12,19,25-tetraoxo-16-oxa-13,20,24-t riazanonacos-1-yl]-4-hydroxy-2-pyrrolidinyl)methyl ester
  misc_feature 1..16: note = RNA
  misc_feature 18..21: note = RNA
  misc_feature 17: note = DNA
ctggtatttcctagggtacaa

SEQ ID NO: 528 - RNA, 21 nt, synthetic construct
  source 1..21: mol_type = other RNA
  modified_base 1: mod_base = OTHER; note = 2'-O-methylcytidine-3'-phosphorothioate
  modified_base 2: mod_base = OTHER; note = 2'-O-methyluridine-3'-phosphorothioate
  modified_base 3: mod_base = OTHER; note = 2'-O-methylguanosine-3'-phosphate
  modified_base 4: mod_base = OTHER; note = 2'-O-methylguanosine-3'-phosphate
  modified_base 5: mod_base = OTHER; note = 2'-O-methyluridine-3'-phosphate
  modified_base 6: mod_base = OTHER; note = 2'-deoxy-2'-fluoroadenosine-3'-phosphate
  modified_base 7: mod_base = OTHER; note = 2'-O-methyluridine-3'-phosphate
  modified_base 8: mod_base = OTHER; note = 2'-O-methyluridine-3'-phosphate
  modified_base 9: mod_base = OTHER; note = 2'-O-methyluridine-3'-phosphate
  modified_base 10: mod_base = OTHER; note = 2'-deoxy-2'-fluorocytidine-3'-phosphate
  modified_base 11: mod_base = OTHER; note = 2'-deoxy-2'-fluorocytidine-3'-phosphate
  modified_base 12: mod_base = OTHER; note = 2'-O-methyluridine-3'-phosphate
  modified_base 13: mod_base = OTHER; note = 2'-deoxy-2'-fluoroadenosine-3'-phosphate
  modified_base 14: mod_base = OTHER; note = 2'-O-methylguanosine-3'-phosphate
  modified_base 15: mod_base = OTHER; note = 2'-O-methylguanosine-3'-phosphate
  modified_base 16: mod_base = OTHER; note = 2'-deoxy-2'-fluoroguanosine-3'-phosphate
  modified_base 17: mod_base = OTHER; note = 2'-O-methyluridine-3'-phosphate
  modified_base 18: mod_base = OTHER; note = 2'-O-methyladenosine-3'-phosphate
  modified_base 19: mod_base = OTHER; note = 2'-O-methylcytidine-3'-phosphate
  modified_base 20: mod_base = OTHER; note = 2'-O-methyladenosine-3'-phosphate
  modified_base 21: mod_base = OTHER; note = 2'-O-methyladenosine-3'-phosphate ((2S,4R)-1-[29-[[2-(acetylamino)-2-deoxy-beta-D-galactopyra nosyl]oxy]-14,14-bis[[3-[[3-[[5-[[2-(acetylamino)-2-deoxy-b eta-D-galactopyranosyl]oxy]-1-oxopentyl]amino]propyl]amino] -3-oxopropoxy]methyl]-1,12,19,25-tetraoxo-16-oxa-13,20,24-t riazanonacos-1-yl]-4-hydroxy-2-pyrrolidinyl)methyl ester
ctggtatttcctagggtacaa

SEQ ID NO: 529 - RNA, 21 nt, synthetic construct
  source 1..21: mol_type = other RNA
  modified_base 1: mod_base = OTHER; note = 2'-O-methylcytidine-3'-phosphorothioate
  modified_base 2: mod_base = OTHER; note = 2'-O-methyluridine-3'-phosphorothioate
  modified_base 3: mod_base = OTHER; note = 2'-O-methylguanosine-3'-phosphate
  modified_base 4: mod_base = OTHER; note = 2'-O-methylguanosine-3'-phosphate
  modified_base 5: mod_base = OTHER; note = 2'-O-methyluridine-3'-phosphate
  modified_base 6: mod_base = OTHER; note = 2'-deoxy-2'-fluoroadenosine-3'-phosphate
  modified_base 7: mod_base = OTHER; note = 2'-O-methyluridine-3'-phosphate
  modified_base 8: mod_base = OTHER; note = 2'-O-methyluridine-3'-phosphate
  modified_base 9: mod_base = OTHER; note = 2'-O-methyluridine-3'-phosphate
  modified_base 10: mod_base = OTHER; note = 2'-O-methylcytidine-3'-phosphate
  modified_base 11: mod_base = OTHER; note = 2'-deoxy-2'-fluorocytidine-3'-phosphate
  modified_base 12: mod_base = OTHER; note = 2'-O-methyluridine-3'-phosphate
  modified_base 13: mod_base = OTHER; note = 2'-O-methyladenosine-3'-phosphate
  modified_base 14: mod_base = OTHER; note = 2'-O-methylguanosine-3'-phosphate
  modified_base 15: mod_base = OTHER; note = 2'-O-methylguanosine-3'-phosphate
  modified_base 16: mod_base = OTHER; note = 2'-O-methylguanosine-3'-phosphate
  modified_base 17: mod_base = OTHER; note = 2'-O-methyluridine-3'-phosphate
  modified_base 18: mod_base = OTHER; note = 2'-O-methyladenosine-3'-phosphate
  modified_base 19: mod_base = OTHER; note = 2'-O-methylcytidine-3'-phosphate
  modified_base 20: mod_base = OTHER; note = 2'-O-methyladenosine-3'-phosphate
  modified_base 21: mod_base = OTHER; note = 2'-O-methyladenosine-3'-phosphate ((2S,4R)-1-[29-[[2-(acetylamino)-2-deoxy-beta-D-galactopyra nosyl]oxy]-14,14-bis[[3-[[3-[[5-[[2-(acetylamino)-2-deoxy-b eta-D-galactopyranosyl]oxy]-1-oxopentyl]amino]propyl]amino] -3-oxopropoxy]methyl]-1,12,19,25-tetraoxo-16-oxa-13,20,24-t riazanonacos-1-yl]-4-hydroxy-2-pyrrolidinyl)methyl ester
ctggtatttcctagggtacaa

SEQ ID NO: 530 - DNA, 21 bp, synthetic construct
  source 1..21: mol_type = other DNA
  modified_base 1: mod_base = OTHER; note = 2'-O-methylcytidine-3'-phosphorothioate
  modified_base 2: mod_base = OTHER; note = 2'-O-methyluridine-3'-phosphorothioate
  modified_base 3: mod_base = OTHER; note = 2'-O-methylguanosine-3'-phosphate
  modified_base 4: mod_base = OTHER; note = 2'-O-methylguanosine-3'-phosphate
  modified_base 5: mod_base = OTHER; note = 2'-O-methyluridine-3'-phosphate
  modified_base 6: mod_base = OTHER; note = 2'-deoxy-2'-fluoroadenosine-3'-phosphate
  modified_base 7: mod_base = OTHER; note = 2'-O-methyluridine-3'-phosphate
  modified_base 8: mod_base = OTHER; note = 2'-O-methyluridine-3'-phosphate
  modified_base 9: mod_base = OTHER; note = 2'-O-methyluridine-3'-phosphate
  modified_base 10: mod_base = OTHER; note = 2'-O-methylcytidine-3'-phosphate
  modified_base 11: mod_base = OTHER; note = 2'-deoxy-2'-fluorocytidine-3'-phosphate
  modified_base 13: mod_base = OTHER; note = 2'-O-methyladenosine-3'-phosphate
  modified_base 14: mod_base = OTHER; note = 2'-O-methylguanosine-3'-phosphate
  modified_base 15: mod_base = OTHER; note = 2'-O-methylguanosine-3'-phosphate
  modified_base 16: mod_base = OTHER; note = 2'-O-methylguanosine-3'-phosphate
  modified_base 17: mod_base = OTHER; note = 2'-O-methyluridine-3'-phosphate
  modified_base 18: mod_base = OTHER; note = 2'-O-methyladenosine-3'-phosphate
  modified_base 19: mod_base = OTHER; note = 2'-O-methylcytidine-3'-phosphate
  modified_base 20: mod_base = OTHER; note = 2'-O-methyladenosine-3'-phosphate
  modified_base 21: mod_base = OTHER; note = 2'-O-methyladenosine-3'-phosphate ((2S,4R)-1-[29-[[2-(acetylamino)-2-deoxy-beta-D-galactopyra nosyl]oxy]-14,14-bis[[3-[[3-[[5-[[2-(acetylamino)-2-deoxy-b eta-D-galactopyranosyl]oxy]-1-oxopentyl]amino]propyl]amino] -3-oxopropoxy]methyl]-1,12,19,25-tetraoxo-16-oxa-13,20,24-t riazanonacos-1-yl]-4-hydroxy-2-pyrrolidinyl)methyl ester
  misc_feature 1..11: note = RNA
  misc_feature 13..21: note = RNA
  misc_feature 12: note = DNA
ctggtatttcctagggtacaa

SEQ ID NO: 531 - DNA, 21 bp, synthetic construct
  source 1..21: mol_type = other DNA
  modified_base 1: mod_base = OTHER; note = 2'-O-methylcytidine-3'-phosphorothioate
  modified_base 2: mod_base = OTHER; note = 2'-O-methyluridine-3'-phosphorothioate
  modified_base 3: mod_base = OTHER; note = 2'-O-methylguanosine-3'-phosphate
  modified_base 4: mod_base = OTHER; note = 2'-O-methylguanosine-3'-phosphate
  modified_base 5: mod_base = OTHER; note = 2'-O-methyluridine-3'-phosphate
  modified_base 6: mod_base = OTHER; note = 2'-O-methyladenosine-3'-phosphate
  modified_base 7: mod_base = OTHER; note = 2'-O-methyluridine-3'-phosphate
  modified_base 8: mod_base = OTHER; note = 2'-O-methyluridine-3'-phosphate
  modified_base 9: mod_base = OTHER; note = 2'-O-methyluridine-3'-phosphate
  modified_base 10: mod_base = OTHER; note = 2'-O-methylcytidine-3'-phosphate
  modified_base 11: mod_base = OTHER; note = 2'-deoxy-2'-fluorocytidine-3'-phosphate
  modified_base 13: mod_base = OTHER; note = 2'-O-methyladenosine-3'-phosphate
  modified_base 14: mod_base = OTHER; note = 2'-O-methylguanosine-3'-phosphate
  modified_base 15: mod_base = OTHER; note = 2'-O-methylguanosine-3'-phosphate
  modified_base 16: mod_base = OTHER; note = 2'-O-methylguanosine-3'-phosphate
  modified_base 17: mod_base = OTHER; note = 2'-O-methyluridine-3'-phosphate
  modified_base 18: mod_base = OTHER; note = 2'-O-methyladenosine-3'-phosphate
  modified_base 19: mod_base = OTHER; note = 2'-O-methylcytidine-3'-phosphate
  modified_base 20: mod_base = OTHER; note = 2'-O-methyladenosine-3'-phosphate
  modified_base 21: mod_base = OTHER; note = 2'-O-methyladenosine-3'-phosphate ((2S,4R)-1-[29-[[2-(acetylamino)-2-deoxy-beta-D-galactopyra nosyl]oxy]-14,14-bis[[3-[[3-[[5-[[2-(acetylamino)-2-deoxy-b eta-D-galactopyranosyl]oxy]-1-oxopentyl]amino]propyl]amino] -3-oxopropoxy]methyl]-1,12,19,25-tetraoxo-16-oxa-13,20,24-t riazanonacos-1-yl]-4-hydroxy-2-pyrrolidinyl)methyl ester
  misc_feature 1..11: note = RNA
  misc_feature 13..21: note = RNA
  misc_feature 12: note = DNA
ctggtatttcctagggtacaa

SEQ ID NO: 532 - DNA, 21 bp, synthetic construct
  source 1..21: mol_type = other DNA
  modified_base 1: mod_base = OTHER; note = 2'-O-methylcytidine-3'-phosphorothioate
  modified_base 2: mod_base = OTHER; note = 2'-O-methyluridine-3'-phosphorothioate
  modified_base 3: mod_base = OTHER; note = 2'-O-methylguanosine-3'-phosphate
  modified_base 4: mod_base = OTHER; note = 2'-O-methylguanosine-3'-phosphate
  modified_base 5: mod_base = OTHER; note = 2'-O-methyluridine-3'-phosphate
  modified_base 6: mod_base = OTHER; note = 2'-deoxy-2'-fluoroadenosine-3'-phosphate
  modified_base 7: mod_base = OTHER; note = 2'-O-methyluridine-3'-phosphate
  modified_base 8: mod_base = OTHER; note = 2'-O-methyluridine-3'-phosphate
  modified_base 9: mod_base = OTHER; note = 2'-O-methyluridine-3'-phosphate
  modified_base 10: mod_base = OTHER; note = 2'-O-methylcytidine-3'-phosphate
  modified_base 11: mod_base = OTHER; note = 2'-deoxy-2'-fluorocytidine-3'-phosphate
  modified_base 13: mod_base = OTHER; note = 2'-O-methyladenosine-3'-phosphate
  modified_base 14: mod_base = OTHER; note = 2'-O-methylguanosine-3'-phosphate
  modified_base 15: mod_base = OTHER; note = 2'-O-methylguanosine-3'-phosphate
  modified_base 16: mod_base = OTHER; note = 2'-O-methylguanosine-3'-phosphate
  modified_base 17: mod_base = OTHER; note = 2'-O-methyluridine-3'-phosphate
  modified_base 18: mod_base = OTHER; note = 2'-O-methyladenosine-3'-phosphate
  modified_base 19: mod_base = OTHER; note = 2'-O-methylcytidine-3'-phosphate
  modified_base 20: mod_base = OTHER; note = 2'-O-methyladenosine-3'-phosphate
  modified_base 21: mod_base = OTHER; note = 2'-O-methyladenosine-3'-phosphate ((2S,4R)-1-[29-[[2-(acetylamino)-2-deoxy-beta-D-galactopyra nosyl]oxy]-14,14-bis[[3-[[3-[[5-[[2-(acetylamino)-2-deoxy-b eta-D-galactopyranosyl]oxy]-1-oxopentyl]amino]propyl]amino] -3-oxopropoxy]methyl]-1,12,19,25-tetraoxo-16-oxa-13,20,24-t riazanonacos-1-yl]-4-hydroxy-2-pyrrolidinyl)methyl ester
  misc_feature 1..11: note = RNA
  misc_feature 13..21: note = RNA
  misc_feature 12: note = DNA
ctggtatttcctagggtacaa

SEQ ID NO: 533 - RNA, 21 nt, synthetic construct
  source 1..21: mol_type = other RNA
  modified_base 1: mod_base = OTHER; note = 2'-deoxy-2'-fluorocytidine-3'-phosphorothioate
  modified_base 2: mod_base = OTHER; note = 2'-O-methyluridine-3'-phosphorothioate
  modified_base 3: mod_base = OTHER; note = 2'-deoxy-2'-fluoroguanosine-3'-phosphate
  modified_base 4: mod_base = OTHER; note = 2'-O-methylguanosine-3'-phosphate
  modified_base 5: mod_base = OTHER; note = 2'-deoxy-2'-fluorouridine-3'-phosphate
  modified_base 6: mod_base = OTHER; note = 2'-O-methyladenosine-3'-phosphate
  modified_base 7: mod_base = OTHER; note = 2'-deoxy-2'-fluorouridine-3'-phosphate
  modified_base 8: mod_base = OTHER; note = 2'-O-methyluridine-3'-phosphate
  modified_base 9: mod_base = OTHER; note = 2'-deoxy-2'-fluorouridine-3'-phosphate
  modified_base 10: mod_base = OTHER; note = 2'-deoxy-2'-fluorocytidine-3'-phosphate
  modified_base 11: mod_base = OTHER; note = 2'-O-methylcytidine-3'-phosphate
  modified_base 12: mod_base = OTHER; note = 2'-O-methyluridine-3'-phosphate
  modified_base 13: mod_base = OTHER; note = 2'-deoxy-2'-fluoroadenosine-3'-phosphate
  modified_base 14: mod_base = OTHER; note = 2'-O-methylguanosine-3'-phosphate
  modified_base 15: mod_base = OTHER; note = 2'-deoxy-2'-fluoroguanosine-3'-phosphate
  modified_base 16: mod_base = OTHER; note = 2'-O-methylguanosine-3'-phosphate
  modified_base 17: mod_base = OTHER; note = 2'-deoxy-2'-fluorouridine-3'-phosphate
  modified_base 18: mod_base = OTHER; note = 2'-O-methyladenosine-3'-phosphate
  modified_base 19: mod_base = OTHER; note = 2'-deoxy-2'-fluorocytidine-3'-phosphate
  modified_base 20: mod_base = OTHER; note = 2'-O-methyladenosine-3'-phosphate
  modified_base 21: mod_base = OTHER; note = 2'-deoxy-2'-fluoroadenosine-3'-phosphate ((2S,4R)-1-[29-[[2-(acetylamino)-2-deoxy-beta-D-galactopyra nosyl]oxy]-14,14-bis[[3-[[3-[[5-[[2-(acetylamino)-2-deoxy-b eta-D-galactopyranosyl]oxy]-1-oxopentyl]amino]propyl]amino] -3-oxopropoxy]methyl]-1,12,19,25-tetraoxo-16-oxa-13,20,24-t riazanonacos-1-yl]-4-hydroxy-2-pyrrolidinyl)methyl ester
ctggtatttcctagggtacaa

SEQ ID NO: 534 - DNA, 21 bp, synthetic construct
  source 1..21: mol_type = other DNA
  modified_base 1: mod_base = OTHER; note = 2'-O-methylcytidine-3'-phosphorothioate
  modified_base 2: mod_base = OTHER; note = 2'-O-methyluridine-3'-phosphorothioate
  modified_base 3: mod_base = OTHER; note = 2'-O-methylguanosine-3'-phosphate
  modified_base 4: mod_base = OTHER; note = 2'-O-methylguanosine-3'-phosphate
  modified_base 5: mod_base = OTHER; note = 2'-O-methyluridine-3'-phosphate
  modified_base 6: mod_base = OTHER; note = 2'-deoxy-2'-fluoroadenosine-3'-phosphate
  modified_base 7: mod_base = OTHER; note = 2'-O-methyluridine-3'-phosphate
  modified_base 8: mod_base = OTHER; note = 2'-O-methyluridine-3'-phosphate
  modified_base 9: mod_base = OTHER; note = 2'-O-methyluridine-3'-phosphate
  modified_base 10: mod_base = OTHER; note = 2'-O-methylcytidine-3'-phosphate
  modified_base 11: mod_base = OTHER; note = 2'-deoxy-2'-fluorocytidine-3'-phosphate
  modified_base 12: mod_base = OTHER; note = 2'-O-methyluridine-3'-phosphate
  modified_base 13: mod_base = OTHER; note = 2'-O-methyladenosine-3'-phosphate
  modified_base 14: mod_base = OTHER; note = 2'-O-methylguanosine-3'-phosphate
  modified_base 15: mod_base = OTHER; note = 2'-O-methylguanosine-3'-phosphate
  modified_base 16: mod_base = OTHER; note = 2'-O-methylguanosine-3'-phosphate
  modified_base 17: mod_base = OTHER; note = 2'-O-methyluridine-3'-phosphate
  modified_base 18: mod_base = OTHER; note = 2'-O-methyladenosine-3'-phosphate
  modified_base 20: mod_base = OTHER; note = 2'-O-methyladenosine-3'-phosphate
  modified_base 21: mod_base = OTHER; note = 2'-O-methyladenosine-3'-phosphate ((2S,4R)-1-[29-[[2-(acetylamino)-2-deoxy-beta-D-galactopyra nosyl]oxy]-14,14-bis[[3-[[3-[[5-[[2-(acetylamino)-2-deoxy-b eta-D-galactopyranosyl]oxy]-1-oxopentyl]amino]propyl]amino] -3-oxopropoxy]methyl]-1,12,19,25-tetraoxo-16-oxa-13,20,24-t riazanonacos-1-yl]-4-hydroxy-2-pyrrolidinyl)methyl ester
  misc_feature 1..18: note = RNA
  misc_feature 20..21: note = RNA
  misc_feature 19: note = DNA
ctggtatttcctagggtacaa

SEQ ID NO: 535 - DNA, 21 bp, synthetic construct
  source 1..21: mol_type = other DNA
  modified_base 1: mod_base = OTHER; note = 2'-O-methylcytidine-3'-phosphorothioate
  modified_base 2: mod_base = OTHER; note = 2'-O-methyluridine-3'-phosphorothioate
  modified_base 3: mod_base = OTHER; note = 2'-O-methylguanosine-3'-phosphate
  modified_base 4: mod_base = OTHER; note = 2'-O-methylguanosine-3'-phosphate
  modified_base 5: mod_base = OTHER; note = 2'-O-methyluridine-3'-phosphate
  modified_base 6: mod_base = OTHER; note = 2'-deoxy-2'-fluoroadenosine-3'-phosphate
  modified_base 7: mod_base = OTHER; note = 2'-O-methyluridine-3'-phosphate
  modified_base 8: mod_base = OTHER; note = 2'-O-methyluridine-3'-phosphate
  modified_base 9: mod_base = OTHER; note = 2'-O-methyluridine-3'-phosphate
  modified_base 10: mod_base = OTHER; note = 2'-O-methylcytidine-3'-phosphate
  modified_base 11: mod_base = OTHER; note = 2'-deoxy-2'-fluorocytidine-3'-phosphate
  modified_base 12: mod_base = OTHER; note = 2'-O-methyluridine-3'-phosphate
  modified_base 13: mod_base = OTHER; note = 2'-O-methyladenosine-3'-phosphate
  modified_base 14: mod_base = OTHER; note = 2'-O-methylguanosine-3'-phosphate
  modified_base 15: mod_base = OTHER; note = 2'-O-methylguanosine-3'-phosphate
  modified_base 16: mod_base = OTHER; note = 2'-O-methylguanosine-3'-phosphate
  modified_base 18: mod_base = OTHER; note = 2'-O-methyladenosine-3'-phosphate
  modified_base 19: mod_base = OTHER; note = 2'-O-methylcytidine-3'-phosphate
  modified_base 20: mod_base = OTHER; note = 2'-O-methyladenosine-3'-phosphate
  modified_base 21: mod_base = OTHER; note = 2'-O-methyladenosine-3'-phosphate ((2S,4R)-1-[29-[[2-(acetylamino)-2-deoxy-beta-D-galactopyra nosyl]oxy]-14,14-bis[[3-[[3-[[5-[[2-(acetylamino)-2-deoxy-b eta-D-galactopyranosyl]oxy]-1-oxopentyl]amino]propyl]amino] -3-oxopropoxy]methyl]-1,12,19,25-tetraoxo-16-oxa-13,20,24-t riazanonacos-1-yl]-4-hydroxy-2-pyrrolidinyl)methyl ester
  misc_feature 1..16: note = RNA
  misc_feature 18..21: note = RNA
  misc_feature 17: note = DNA
ctggtatttcctagggtacaa

SEQ ID NO: 536 - RNA, 21 nt, synthetic construct
  source 1..21: mol_type = other RNA
  modified_base 1: mod_base = OTHER; note = 2'-O-methylcytidine-3'-phosphorothioate
  modified_base 2: mod_base = OTHER; note = 2'-O-methyluridine-3'-phosphorothioate
  modified_base 3: mod_base = OTHER; note = 2'-O-methylguanosine-3'-phosphate
  modified_base 4: mod_base = OTHER; note = 2'-O-methylguanosine-3'-phosphate
  modified_base 5: mod_base = OTHER; note = 2'-O-methyluridine-3'-phosphate
  modified_base 6: mod_base = OTHER; note = 2'-O-methyladenosine-3'-phosphate
  modified_base 7: mod_base = OTHER; note = 2'-O-methyluridine-3'-phosphate
  modified_base 8: mod_base = OTHER; note = 2'-O-methyluridine-3'-phosphate
  modified_base 9: mod_base = OTHER; note = 2'-O-methyluridine-3'-phosphate
  modified_base 10: mod_base = OTHER; note = 2'-O-methylcytidine-3'-phosphate
  modified_base 11: mod_base = OTHER; note = 2'-deoxy-2'-fluorocytidine-3'-phosphate
  modified_base 12: mod_base = OTHER; note = 2'-deoxy-2'-fluorouridine-3'-phosphate
  modified_base 13: mod_base = OTHER; note = 2'-O-methyladenosine-3'-phosphate
  modified_base 14: mod_base = OTHER; note = 2'-O-methylguanosine-3'-phosphate
  modified_base 15: mod_base = OTHER; note = 2'-O-methylguanosine-3'-phosphate
  modified_base 16: mod_base = OTHER; note = 2'-O-methylguanosine-3'-phosphate
  modified_base 17: mod_base = OTHER; note = 2'-O-methyluridine-3'-phosphate
  modified_base 18: mod_base = OTHER; note = 2'-O-methyladenosine-3'-phosphate
  modified_base 19: mod_base = OTHER; note = 2'-O-methylcytidine-3'-phosphate
  modified_base 20: mod_base = OTHER; note = 2'-O-methyladenosine-3'-phosphate
  modified_base 21: mod_base = OTHER; note = 2'-O-methyladenosine-3'-phosphate ((2S,4R)-1-[29-[[2-(acetylamino)-2-deoxy-beta-D-galactopyra nosyl]oxy]-14,14-bis[[3-[[3-[[5-[[2-(acetylamino)-2-deoxy-b eta-D-galactopyranosyl]oxy]-1-oxopentyl]amino]propyl]amino] -3-oxopropoxy]methyl]-1,12,19,25-tetraoxo-16-oxa-13,20,24-t riazanonacos-1-yl]-4-hydroxy-2-pyrrolidinyl)methyl ester
ctggtatttcctagggtacaa

SEQ ID NO: 537 - DNA, 21 bp, synthetic construct
  source 1..21: mol_type = other DNA
  modified_base 1: mod_base = OTHER; note = 2'-O-methylcytidine-3'-phosphorothioate
  modified_base 2: mod_base = OTHER; note = 2'-O-methyluridine-3'-phosphorothioate
  modified_base 3: mod_base = OTHER; note = 2'-O-methylguanosine-3'-phosphate
  modified_base 4: mod_base = OTHER; note = 2'-O-methylguanosine-3'-phosphate
  modified_base 5: mod_base = OTHER; note = 2'-O-methyluridine-3'-phosphate
  modified_base 6: mod_base = OTHER; note = 2'-O-methyladenosine-3'-phosphate
  modified_base 7: mod_base = OTHER; note = 2'-deoxy-2'-fluorouridine-3'-phosphate
  modified_base 8: mod_base = OTHER; note = 2'-O-methyluridine-3'-phosphate
  modified_base 9: mod_base = OTHER; note = 2'-deoxy-2'-fluorouridine-3'-phosphate
  modified_base 10: mod_base = OTHER; note = 2'-deoxy-2'-fluorocytidine-3'-phosphate
  modified_base 12: mod_base = OTHER; note = 2'-O-methyluridine-3'-phosphate
  modified_base 13: mod_base = OTHER; note = 2'-O-methyladenosine-3'-phosphate
  modified_base 14: mod_base = OTHER; note = 2'-O-methylguanosine-3'-phosphate
  modified_base 15: mod_base = OTHER; note = 2'-O-methylguanosine-3'-phosphate
  modified_base 16: mod_base = OTHER; note = 2'-deoxy-2'-fluoroguanosine-3'-phosphate
  modified_base 17: mod_base = OTHER; note = 2'-O-methyluridine-3'-phosphate
  modified_base 18: mod_base = OTHER; note = 2'-O-methyladenosine-3'-phosphate
  modified_base 19: mod_base = OTHER; note = 2'-O-methylcytidine-3'-phosphate
  modified_base 20: mod_base = OTHER; note = 2'-O-methyladenosine-3'-phosphate
  modified_base 21: mod_base = OTHER; note = 2'-O-methyladenosine-3'-phosphate ((2S,4R)-1-[29-[[2-(acetylamino)-2-deoxy-beta-D-galactopyra nosyl]oxy]-14,14-bis[[3-[[3-[[5-[[2-(acetylamino)-2-deoxy-b eta-D-galactopyranosyl]oxy]-1-oxopentyl]amino]propyl]amino] -3-oxopropoxy]methyl]-1,12,19,25-tetraoxo-16-oxa-13,20,24-t riazanonacos-1-yl]-4-hydroxy-2-pyrrolidinyl)methyl ester
  misc_feature 1..10: note = RNA
  misc_feature 12..21: note = RNA
  misc_feature 11: note = DNA
ctggtatttcctagggtacaa

SEQ ID NO: 538 - RNA, 21 nt, synthetic construct
  source 1..21: mol_type = other RNA
  modified_base 1: mod_base = OTHER; note = 2'-O-methylcytidine-3'-phosphorothioate
  modified_base 2: mod_base = OTHER; note = 2'-O-methyluridine-3'-phosphorothioate
  modified_base 3: mod_base = OTHER; note = 2'-O-methylguanosine-3'-phosphate
  modified_base 4: mod_base = OTHER; note = 2'-O-methylguanosine-3'-phosphate
  modified_base 5: mod_base = OTHER; note = 2'-O-methyluridine-3'-phosphate
  modified_base 6: mod_base = OTHER; note = 2'-deoxy-2'-fluoroadenosine-3'-phosphate
  modified_base 7: mod_base = OTHER; note = 2'-O-methyluridine-3'-phosphate
  modified_base 8: mod_base = OTHER; note = 2'-O-methyluridine-3'-phosphate
  modified_base 9: mod_base = OTHER; note = 2'-deoxy-2'-fluorouridine-3'-phosphate
  modified_base 10: mod_base = OTHER; note = 2'-O-methylcytidine-3'-phosphate
  modified_base 11: mod_base = OTHER; note = 2'-deoxy-2'-fluorocytidine-3'-phosphate
  modified_base 12: mod_base = OTHER; note = 2'-deoxy-2'-fluorouridine-3'-phosphate
  modified_base 13: mod_base = OTHER; note = 2'-O-methyladenosine-3'-phosphate
  modified_base 14: mod_base = OTHER; note = 2'-O-methylguanosine-3'-phosphate
  modified_base 15: mod_base = OTHER; note = 2'-deoxy-2'-fluoroguanosine-3'-phosphate
  modified_base 16: mod_base = OTHER; note = 2'-deoxy-2'-fluoroguanosine-3'-phosphate
  modified_base 17: mod_base = OTHER; note = 2'-O-methyluridine-3'-phosphate
  modified_base 18: mod_base = OTHER; note = 2'-O-methyladenosine-3'-phosphate
  modified_base 19: mod_base = OTHER; note = 2'-O-methylcytidine-3'-phosphate
  modified_base 20: mod_base = OTHER; note = 2'-O-methyladenosine-3'-phosphate
  modified_base 21: mod_base = OTHER; note = 2'-O-methyladenosine-3'-phosphate ((2S,4R)-1-[29-[[2-(acetylamino)-2-deoxy-beta-D-galactopyra nosyl]oxy]-14,14-bis[[3-[[3-[[5-[[2-(acetylamino)-2-deoxy-b eta-D-galactopyranosyl]oxy]-1-oxopentyl]amino]propyl]amino] -3-oxopropoxy]methyl]-1,12,19,25-tetraoxo-16-oxa-13,20,24-t riazanonacos-1-yl]-4-hydroxy-2-pyrrolidinyl)methyl ester
ctggtatttcctagggtacaa

SEQ ID NO: 539 - RNA, 21 nt, synthetic construct
  source 1..21: mol_type = other RNA
  modified_base 1: mod_base = OTHER; note = 2'-deoxy-2'-fluorocytidine-3'-phosphorothioate
  modified_base 2: mod_base = OTHER; note = 2'-O-methyluridine-3'-phosphorothioate
  modified_base 3: mod_base = OTHER; note = 2'-deoxy-2'-fluoroguanosine-3'-phosphate
  modified_base 4: mod_base = OTHER; note = 2'-O-methylguanosine-3'-phosphate
  modified_base 5: mod_base = OTHER; note = 2'-deoxy-2'-fluorouridine-3'-phosphate
  modified_base 6: mod_base = OTHER; note = 2'-O-methyladenosine-3'-phosphate
  modified_base 7: mod_base = OTHER; note = 2'-deoxy-2'-fluorouridine-3'-phosphate
  modified_base 8: mod_base = OTHER; note = 2'-O-methyluridine-3'-phosphate
  modified_base 9: mod_base = OTHER; note = 2'-deoxy-2'-fluorouridine-3'-phosphate
  modified_base 10: mod_base = OTHER; note = 2'-deoxy-2'-fluorocytidine-3'-phosphate
  modified_base 11: mod_base = OTHER; note = 2'-deoxy-2'-fluorocytidine-3'-phosphate
  modified_base 12: mod_base = OTHER; note = 2'-O-methyluridine-3'-phosphate
  modified_base 13: mod_base = OTHER; note = 2'-deoxy-2'-fluoroadenosine-3'-phosphate
  modified_base 14: mod_base = OTHER; note = 2'-O-methylguanosine-3'-phosphate
  modified_base 15: mod_base = OTHER; note = 2'-deoxy-2'-fluoroguanosine-3'-phosphate
  modified_base 16: mod_base = OTHER; note = 2'-O-methylguanosine-3'-phosphate
  modified_base 17: mod_base = OTHER; note = 2'-deoxy-2'-fluorouridine-3'-phosphate
  modified_base 18: mod_base = OTHER; note = 2'-O-methyladenosine-3'-phosphate
  modified_base 19: mod_base = OTHER; note = 2'-deoxy-2'-fluorocytidine-3'-phosphate
  modified_base 20: mod_base = OTHER; note = 2'-O-methyladenosine-3'-phosphate
  modified_base 21: mod_base = OTHER; note = 2'-deoxy-2'-fluoroadenosine-3'-phosphate ((2S,4R)-1-[29-[[2-(acetylamino)-2-deoxy-beta-D-galactopyra nosyl]oxy]-14,14-bis[[3-[[3-[[5-[[2-(acetylamino)-2-deoxy-b eta-D-galactopyranosyl]oxy]-1-oxopentyl]amino]propyl]amino] -3-oxopropoxy]methyl]-1,12,19,25-tetraoxo-16-oxa-13,20,24-t riazanonacos-1-yl]-4-hydroxy-2-pyrrolidinyl)methyl ester
ctggtatttcctagggtacaa

SEQ ID NO: 540 - DNA, 21 bp, synthetic construct
  source 1..21: mol_type = other DNA
  modified_base 1: mod_base = OTHER; note = 2'-O-methylcytidine-3'-phosphorothioate
  modified_base 2: mod_base = OTHER; note = 2'-O-methyluridine-3'-phosphorothioate
  modified_base 3: mod_base = OTHER; note = 2'-O-methylguanosine-3'-phosphate
  modified_base 4: mod_base = OTHER; note = 2'-O-methylguanosine-3'-phosphate
  modified_base 5: mod_base = OTHER; note = 2'-O-methyluridine-3'-phosphate
  modified_base 6: mod_base = OTHER; note = 2'-O-methyladenosine-3'-phosphate
  modified_base 7: mod_base = OTHER; note = 2'-O-methyluridine-3'-phosphate
  modified_base 8: mod_base = OTHER; note = 2'-O-methyluridine-3'-phosphate
  modified_base 9: mod_base = OTHER; note = 2'-O-methyluridine-3'-phosphate
  modified_base 10: mod_base = OTHER; note = 2'-O-methylcytidine-3'-phosphate
  modified_base 12: mod_base = OTHER; note = 2'-O-methyluridine-3'-phosphate
  modified_base 13: mod_base = OTHER; note = 2'-O-methyladenosine-3'-phosphate
  modified_base 14: mod_base = OTHER; note = 2'-O-methylguanosine-3'-phosphate
  modified_base 15: mod_base = OTHER; note = 2'-O-methylguanosine-3'-phosphate
  modified_base 16: mod_base = OTHER; note = 2'-O-methylguanosine-3'-phosphate
  modified_base 17: mod_base = OTHER; note = 2'-O-methyluridine-3'-phosphate
  modified_base 18: mod_base = OTHER; note = 2'-O-methyladenosine-3'-phosphate
  modified_base 19: mod_base = OTHER; note = 2'-O-methylcytidine-3'-phosphate
  modified_base 20: mod_base = OTHER; note = 2'-O-methyladenosine-3'-phosphate
  modified_base 21: mod_base = OTHER; note = 2'-O-methyladenosine-3'-phosphate ((2S,4R)-1-[29-[[2-(acetylamino)-2-deoxy-beta-D-galactopyra nosyl]oxy]-14,14-bis[[3-[[3-[[5-[[2-(acetylamino)-2-deoxy-b eta-D-galactopyranosyl]oxy]-1-oxopentyl]amino]propyl]amino] -3-oxopropoxy]methyl]-1,12,19,25-tetraoxo-16-oxa-13,20,24-t riazanonacos-1-yl]-4-hydroxy-2-pyrrolidinyl)methyl ester
  misc_feature 1..10: note = RNA
  misc_feature 12..21: note = RNA
  misc_feature 11: note = DNA
ctggtatttcctagggtacaa

SEQ ID NO: 541 - DNA, 21 bp, synthetic construct
  source 1..21: mol_type = other DNA
  modified_base 1: mod_base = OTHER; note = 2'-O-methylcytidine-3'-phosphorothioate
  modified_base 2: mod_base = OTHER; note = 2'-O-methyluridine-3'-phosphorothioate
  modified_base 3: mod_base = OTHER; note = 2'-O-methylguanosine-3'-phosphate
  modified_base 4: mod_base = OTHER; note = 2'-O-methylguanosine-3'-phosphate
  modified_base 5: mod_base = OTHER; note = 2'-O-methyluridine-3'-phosphate
  modified_base 6: mod_base = OTHER; note = 2'-deoxy-2'-fluoroadenosine-3'-phosphate
  modified_base 7: mod_base = OTHER; note = 2'-O-methyluridine-3'-phosphate
  modified_base 8: mod_base = OTHER; note = 2'-O-methyluridine-3'-phosphate
  modified_base 9: mod_base = OTHER; note = 2'-O-methyluridine-3'-phosphate
  modified_base 10: mod_base = OTHER; note = 2'-O-methylcytidine-3'-phosphate
  modified_base 11: mod_base = OTHER; note = 2'-deoxy-2'-fluorocytidine-3'-phosphate
  modified_base 12: mod_base = OTHER; note = 2'-O-methyluridine-3'-phosphate
  modified_base 13: mod_base = OTHER; note = 2'-O-methyladenosine-3'-phosphate
  modified_base 14: mod_base = OTHER; note = 2'-O-methylguanosine-3'-phosphate
  modified_base 15: mod_base = OTHER; note = 2'-O-methylguanosine-3'-phosphate
  modified_base 16: mod_base = OTHER; note = 2'-O-methylguanosine-3'-phosphate
  modified_base 17: mod_base = OTHER; note = 2'-O-methyluridine-3'-phosphate
  modified_base 18: mod_base = OTHER; note = 2'-O-methyladenosine-3'-phosphate
  modified_base 20: mod_base = OTHER; note = 2'-O-methyladenosine-3'-phosphate
  modified_base 21: mod_base = OTHER; note = 2'-O-methyladenosine-3'-phosphate ((2S,4R)-1-[29-[[2-(acetylamino)-2-deoxy-beta-D-galactopyra nosyl]oxy]-14,14-bis[[3-[[3-[[5-[[2-(acetylamino)-2-deoxy-b eta-D-galactopyranosyl]oxy]-1-oxopentyl]amino]propyl]amino] -3-oxopropoxy]methyl]-1,12,19,25-tetraoxo-16-oxa-13,20,24-t riazanonacos-1-yl]-4-hydroxy-2-pyrrolidinyl)methyl ester
  misc_feature 1..18: note = RNA
  misc_feature 20..21: note = RNA
  misc_feature 19: note = DNA
ctggtatttcctagggtacaa

SEQ ID NO: 542 - DNA, 21 bp, synthetic construct
  source 1..21: mol_type = other DNA
  modified_base 1: mod_base = OTHER; note = 2'-O-methylcytidine-3'-phosphorothioate
  modified_base 2: mod_base = OTHER; note = 2'-O-methyluridine-3'-phosphorothioate
  modified_base 3: mod_base = OTHER; note = 2'-O-methylguanosine-3'-phosphate
  modified_base 4: mod_base = OTHER; note = 2'-O-methylguanosine-3'-phosphate
  modified_base 5: mod_base = OTHER; note = 2'-O-methyluridine-3'-phosphate
  modified_base 6: mod_base = OTHER; note = 2'-O-methyladenosine-3'-phosphate
  modified_base 7: mod_base = OTHER; note = 2'-O-methyluridine-3'-phosphate
  modified_base 8: mod_base = OTHER; note = 2'-O-methyluridine-3'-phosphate
  modified_base 9: mod_base = OTHER; note = 2'-O-methyluridine-3'-phosphate
  modified_base 10: mod_base = OTHER; note = 2'-O-methylcytidine-3'-phosphate
  modified_base 13: mod_base = OTHER; note = 2'-O-methyladenosine-3'-phosphate
  modified_base 14: mod_base = OTHER; note = 2'-O-methylguanosine-3'-phosphate
  modified_base 15: mod_base = OTHER; note = 2'-O-methylguanosine-3'-phosphate
  modified_base 16: mod_base = OTHER; note = 2'-O-methylguanosine-3'-phosphate
  modified_base 17: mod_base = OTHER; note = 2'-O-methyluridine-3'-phosphate
  modified_base 18: mod_base = OTHER; note = 2'-O-methyladenosine-3'-phosphate
  modified_base 19: mod_base = OTHER; note = 2'-O-methylcytidine-3'-phosphate
  modified_base 20: mod_base = OTHER; note = 2'-O-methyladenosine-3'-phosphate
  modified_base 21: mod_base = OTHER; note = 2'-O-methyladenosine-3'-phosphate ((2S,4R)-1-[29-[[2-(acetylamino)-2-deoxy-beta-D-galactopyra nosyl]oxy]-14,14-bis[[3-[[3-[[5-[[2-(acetylamino)-2-deoxy-b eta-D-galactopyranosyl]oxy]-1-oxopentyl]amino]propyl]amino] -3-oxopropoxy]methyl]-1,12,19,25-tetraoxo-16-oxa-13,20,24-t riazanonacos-1-yl]-4-hydroxy-2-pyrrolidinyl)methyl ester
  misc_feature 1..10: note = RNA
  misc_feature 13..21: note = RNA
  misc_feature 11..12: note = DNA
ctggtatttcctagggtacaa

SEQ ID NO: 543 - RNA, 21 nt, synthetic construct
  source 1..21: mol_type = other RNA
  modified_base 1: mod_base = OTHER; note = 2'-O-methylcytidine-3'-phosphorothioate
  modified_base 2: mod_base = OTHER; note = 2'-O-methyluridine-3'-phosphorothioate
  modified_base 3: mod_base = OTHER; note = 2'-O-methylguanosine-3'-phosphate
  modified_base 4: mod_base = OTHER; note = 2'-O-methylguanosine-3'-phosphate
  modified_base 5: mod_base = OTHER; note = 2'-O-methyluridine-3'-phosphate
  modified_base 6: mod_base = OTHER; note = 2'-deoxy-2'-fluoroadenosine-3'-phosphate
  modified_base 7: mod_base = OTHER; note = 2'-O-methyluridine-3'-phosphate
  modified_base 8: mod_base = OTHER; note = 2'-O-methyluridine-3'-phosphate
  modified_base 9: mod_base = OTHER; note = 2'-O-methyluridine-3'-phosphate
  modified_base 10: mod_base = OTHER; note = 2'-O-methylcytidine-3'-phosphate
  modified_base 11: mod_base = OTHER; note = 2'-deoxy-2'-fluorocytidine-3'-phosphate
  modified_base 12: mod_base = OTHER; note = 2'-O-methyluridine-3'-phosphate
  modified_base 13: mod_base = OTHER; note = 2'-O-methyladenosine-3'-phosphate
  modified_base 14: mod_base = OTHER; note = 2'-O-methylguanosine-3'-phosphate
  modified_base 15: mod_base = OTHER; note = 2'-O-methylguanosine-3'-phosphate
  modified_base 16: mod_base = OTHER; note = 2'-O-methylguanosine-3'-phosphate
  modified_base 17: mod_base = OTHER; note = 2'-O-methyluridine-3'-phosphate
  modified_base 18: mod_base = OTHER; note = 2'-O-methyladenosine-3'-phosphate
  modified_base 19: mod_base = OTHER; note = 2'-O-methylcytidine-3'-phosphate
  modified_base 20: mod_base = OTHER; note = 2'-O-methyladenosine-3'-phosphate
  modified_base 21: mod_base = OTHER; note = 2'-O-methyladenosine-3'-phosphate ((2S,4R)-1-[29-[[2-(acetylamino)-2-deoxy-beta-D-galactopyra nosyl]oxy]-14,14-bis[[3-[[3-[[5-[[2-(acetylamino)-2-deoxy-b eta-D-galactopyranosyl]oxy]-1-oxopentyl]amino]propyl]amino] -3-oxopropoxy]methyl]-1,12,19,25-tetraoxo-16-oxa-13,20,24-t riazanonacos-1-yl]-4-hydroxy-2-pyrrolidinyl)methyl ester
ctggtatttcctagggtacaa

SEQ ID NO: 544 - RNA, 23 nt, synthetic construct
  source 1..23: mol_type = other RNA
  modified_base 1: mod_base = OTHER; note = 2'-O-methyluridine-3'-phosphorothioate 5'phosphate
  modified_base 2: mod_base = OTHER; note = 2'-deoxy-2'-fluorouridine-3'-phosphorothioate
  modified_base 3: mod_base = OTHER; note = 2'-O-methylguanosine-3'-phosphate
  modified_base 4: mod_base = OTHER; note = 2'-deoxy-2'-fluorouridine-3'-phosphate
  modified_base 5: mod_base = OTHER; note = 2'-O-methyladenosine-3'-phosphate
  modified_base 6: mod_base = OTHER; note = 2'-deoxy-2'-fluorocytidine-3'-phosphate
  modified_base 7: mod_base = OTHER; note = 2'-O-methylcytidine-3'-phosphate
  modified_base 8: mod_base = OTHER; note = 2'-deoxy-2'-fluorocytidine-3'-phosphate
  modified_base 9: mod_base = OTHER; note = 2'-O-methyluridine-3'-phosphate
  modified_base 10: mod_base = OTHER; note = 2'-deoxy-2'-fluoroadenosine-3'-phosphate
  modified_base 11: mod_base = OTHER; note = 2'-O-methylguanosine-3'-phosphate
  modified_base 12: mod_base = OTHER; note = 2'-O-methylguanosine-3'-phosphate
  modified_base 13: mod_base = OTHER; note = 2'-O-methyladenosine-3'-phosphate
  modified_base 14: mod_base = OTHER; note = 2'-deoxy-2'-fluoroadenosine-3'-phosphate
  modified_base 15: mod_base = OTHER; note = 2'-O-methyladenosine-3'-phosphate
  modified_base 16: mod_base = OTHER; note = 2'-deoxy-2'-fluorouridine-3'-phosphate
  modified_base 17: mod_base = OTHER; note = 2'-O-methyladenosine-3'-phosphate
  modified_base 18: mod_base = OTHER; note = 2'-deoxy-2'-fluorocytidine-3'-phosphate
  modified_base 19: mod_base = OTHER; note = 2'-O-methylcytidine-3'-phosphate
  modified_base 20: mod_base = OTHER; note = 2'-deoxy-2'-fluoroadenosine-3'-phosphate
  modified_base 21: mod_base = OTHER; note = 2'-O-methylguanosine-3'-phosphorothioate
  modified_base 22: mod_base = OTHER; note = 2'-O-methyladenosine-3'-phosphorothioate
  modified_base 23: mod_base = OTHER; note = 2'-O-methylguanosine
ttgtaccctaggaaataccagag

SEQ ID NO: 545 - RNA, 23 nt, synthetic construct
  source 1..23: mol_type = other RNA
  modified_base 1: mod_base = OTHER; note = 2'-O-methyluridine-3'-phosphorothioate
  modified_base 2: mod_base = OTHER; note = 2'-deoxy-2'-fluorouridine-3'-phosphorothioate
  modified_base 3: mod_base = OTHER; note = 2'-O-methylguanosine-3'-phosphate
  modified_base 4: mod_base = OTHER; note = 2'-O-methyluridine-3'-phosphate
  modified_base 5: mod_base = OTHER; note = 2'-O-methyladenosine-3'-phosphate
  modified_base 6: mod_base = OTHER; note = 2'-deoxy-2'-fluorocytidine-3'-phosphate
  modified_base 7: mod_base = OTHER; note = 2'-O-methylcytidine-3'-phosphate
  modified_base 8: mod_base = OTHER; note = 2'-deoxy-2'-fluorocytidine-3'-phosphate
  modified_base 9: mod_base = OTHER; note = 2'-O-methyluridine-3'-phosphate
  modified_base 10: mod_base = OTHER; note = 2'-deoxy-2'-fluoroadenosine-3'-phosphate
  modified_base 11: mod_base = OTHER; note = 2'-O-methylguanosine-3'-phosphate
  modified_base 12: mod_base = OTHER; note = 2'-O-methylguanosine-3'-phosphate
  modified_base 13: mod_base = OTHER; note = 2'-O-methyladenosine-3'-phosphate
  modified_base 14: mod_base = OTHER; note = 2'-deoxy-2'-fluoroadenosine-3'-phosphate
  modified_base 15: mod_base = OTHER; note = 2'-O-methyladenosine-3'-phosphate
  modified_base 16: mod_base = OTHER; note = 2'-deoxy-2'-fluorouridine-3'-phosphate
  modified_base 17: mod_base = OTHER; note = 2'-O-methyladenosine-3'-phosphate
  modified_base 18: mod_base = OTHER; note = 2'-O-methylcytidine-3'-phosphate
  modified_base 19: mod_base = OTHER; note = 2'-O-methylcytidine-3'-phosphate
  modified_base 20: mod_base = OTHER; note = 2'-O-methyladenosine-3'-phosphate
  modified_base 21: mod_base = OTHER; note = 2'-O-methylguanosine-3'-phosphorothioate
  modified_base 22: mod_base = OTHER; note = 2'-O-methyladenosine-3'-phosphorothioate
  modified_base 23: mod_base = OTHER; note = 2'-O-methylguanosine
ttgtaccctaggaaataccagag

SEQ ID NO: 546 - RNA, 23 nt, synthetic construct
  source 1..23: mol_type = other RNA
  modified_base 1: mod_base = OTHER; note = 2'-O-methyluridine-3'-phosphorothioate
  modified_base 2: mod_base = OTHER; note = 2'-deoxy-2'-fluorouridine-3'-phosphorothioate
  modified_base 3: mod_base = OTHER; note = 2'-O-methylguanosine-3'-phosphate
  modified_base 4: mod_base = OTHER; note = 2'-deoxy-2'-fluorouridine-3'-phosphate
  modified_base 5: mod_base = OTHER; note = 2'-O-methyladenosine-3'-phosphate
  modified_base 6: mod_base = OTHER; note = 2'-deoxy-2'-fluorocytidine-3'-phosphate
  modified_base 7: mod_base = OTHER; note = 2'-O-methylcytidine-3'-phosphate
  modified_base 8: mod_base = OTHER; note = 2'-deoxy-2'-fluorocytidine-3'-phosphate
  modified_base 9: mod_base = OTHER; note = 2'-O-methyluridine-3'-phosphate
  modified_base 10: mod_base = OTHER; note = 2'-deoxy-2'-fluoroadenosine-3'-phosphate
  modified_base 11: mod_base = OTHER; note = 2'-O-methylguanosine-3'-phosphate
  modified_base 12: mod_base = OTHER; note = 2'-O-methylguanosine-3'-phosphate
  modified_base 13: mod_base = OTHER; note = 2'-O-methyladenosine-3'-phosphate
  modified_base 14: mod_base = OTHER; note = 2'-deoxy-2'-fluoroadenosine-3'-phosphate
  modified_base 15: mod_base = OTHER; note = 2'-O-methyladenosine-3'-phosphate
  modified_base 16: mod_base = OTHER; note = 2'-deoxy-2'-fluorouridine-3'-phosphate
  modified_base 17: mod_base = OTHER; note = 2'-O-methyladenosine-3'-phosphate
  modified_base 18: mod_base = OTHER; note = 2'-deoxy-2'-fluorocytidine-3'-phosphate
  modified_base 19: mod_base = OTHER; note = 2'-O-methylcytidine-3'-phosphate
  modified_base 20: mod_base = OTHER; note = 2'-deoxy-2'-fluoroadenosine-3'-phosphate
  modified_base 21: mod_base = OTHER; note = 2'-O-methylguanosine-3'-phosphorothioate
  modified_base 22: mod_base = OTHER; note = 2'-O-methyladenosine-3'-phosphorothioate
  modified_base 23: mod_base = OTHER; note = 2'-O-methylguanosine
ttgtaccctaggaaataccagag

SEQ ID NO: 547 - RNA, 23 nt, synthetic construct
  source 1..23: mol_type = other RNA
  modified_base 1: mod_base = OTHER; note = 2'-O-methyluridine-3'-phosphorothioate 5'phosphate
  modified_base 2: mod_base = OTHER; note = 2'-deoxy-2'-fluorouridine-3'-phosphorothioate
  modified_base 3: mod_base = OTHER; note = 2'-O-methylguanosine-3'-phosphate
  modified_base 4: mod_base = OTHER; note = 2'-deoxy-2'-fluorouridine-3'-phosphate
  modified_base 5: mod_base = OTHER; note = 2'-O-methyladenosine-3'-phosphate
  modified_base 6: mod_base = OTHER; note = 2'-deoxy-2'-fluorocytidine-3'-phosphate
  modified_base 7: mod_base = OTHER; note = 2'-O-methylcytidine-3'-phosphate
  modified_base 8: mod_base = OTHER; note = 2'-deoxy-2'-fluorocytidine-3'-phosphate
  modified_base 9: mod_base = OTHER; note = 2'-O-methyluridine-3'-phosphate
  modified_base 10: mod_base = OTHER; note = 2'-deoxy-2'-fluoroadenosine-3'-phosphate
  modified_base 11: mod_base = OTHER; note = 2'-O-methylguanosine-3'-phosphate
  modified_base 12: mod_base = OTHER; note = 2'-O-methylguanosine-3'-phosphate
  modified_base 13: mod_base = OTHER; note = 2'-O-methyladenosine-3'-phosphate
  modified_base 14: mod_base = OTHER; note = 2'-deoxy-2'-fluoroadenosine-3'-phosphate
  modified_base 15: mod_base = OTHER; note = 2'-O-methyladenosine-3'-phosphate
  modified_base 16: mod_base = OTHER; note = 2'-deoxy-2'-fluorouridine-3'-phosphate
  modified_base 17: mod_base = OTHER; note = 2'-O-methyladenosine-3'-phosphate
  modified_base 18: mod_base = OTHER; note = 2'-deoxy-2'-fluorocytidine-3'-phosphate
  modified_base 19: mod_base = OTHER; note = 2'-O-methylcytidine-3'-phosphate
  modified_base 20: mod_base = OTHER; note = 2'-deoxy-2'-fluoroadenosine-3'-phosphate
  modified_base 21: mod_base = OTHER; note = 2'-O-methylguanosine-3'-phosphorothioate
  modified_base 22: mod_base = OTHER; note = 2'-O-methyladenosine-3'-phosphorothioate
  modified_base 23: mod_base = OTHER; note = 2'-O-methylguanosine
ttgtaccctaggaaataccagag

SEQ ID NO: 548 - RNA, 23 nt, synthetic construct
  source 1..23: mol_type = other RNA
  modified_base 1: mod_base = OTHER; note = 2'-O-methyluridine-3'-phosphorothioate
  modified_base 2: mod_base = OTHER; note = 2'-deoxy-2'-fluorouridine-3'-phosphorothioate
  modified_base 3: mod_base = OTHER; note = 2'-O-methylguanosine-3'-phosphate
  modified_base 4: mod_base = OTHER; note = 2'-deoxy-2'-fluorouridine-3'-phosphate
  modified_base 5: mod_base = OTHER; note = 2'-O-methyladenosine-3'-phosphate
  modified_base 6: mod_base = OTHER; note = 2'-deoxy-2'-fluorocytidine-3'-phosphate
  modified_base 7: mod_base = OTHER; note = 2'-O-methylcytidine-3'-phosphate
  modified_base 8: mod_base = OTHER; note = 2'-deoxy-2'-fluorocytidine-3'-phosphate
  modified_base 9: mod_base = OTHER; note = 2'-O-methyluridine-3'-phosphate
  modified_base 10: mod_base = OTHER; note = 2'-deoxy-2'-fluoroadenosine-3'-phosphate
  modified_base 11: mod_base = OTHER; note = 2'-O-methylguanosine-3'-phosphate
  modified_base 12: mod_base = OTHER; note = 2'-O-methylguanosine-3'-phosphate
  modified_base 13: mod_base = OTHER; note = 2'-O-methyladenosine-3'-phosphate
  modified_base 14: mod_base = OTHER; note = 2'-deoxy-2'-fluoroadenosine-3'-phosphate
  modified_base 15: mod_base = OTHER; note = 2'-O-methyladenosine-3'-phosphate
  modified_base 16: mod_base = OTHER; note = 2'-deoxy-2'-fluorouridine-3'-phosphate
  modified_base 17: mod_base = OTHER; note = 2'-O-methyladenosine-3'-phosphate
  modified_base 18: mod_base = OTHER; note = 2'-deoxy-2'-fluorocytidine-3'-phosphate
  modified_base 19: mod_base = OTHER; note = 2'-O-methylcytidine-3'-phosphate
  modified_base 20: mod_base = OTHER; note = 2'-deoxy-2'-fluoroadenosine-3'-phosphate
  modified_base 21: mod_base = OTHER; note = 2'-O-methylguanosine-3'-phosphorothioate
  modified_base 22: mod_base = OTHER; note = 2'-O-methyladenosine-3'-phosphorothioate
  modified_base 23: mod_base = OTHER; note = 2'-O-methylguanosine
ttgtaccctaggaaataccagag

SEQ ID NO: 549 - RNA, 23 nt, synthetic construct
  source 1..23: mol_type = other RNA
  modified_base 1: mod_base = OTHER; note = 2'-O-methyluridine-3'-phosphorothioate
  modified_base 2: mod_base = OTHER; note = 2'-deoxy-2'-fluorouridine-3'-phosphorothioate
  modified_base 3: mod_base = OTHER; note = 2'-O-methylguanosine-3'-phosphate
  modified_base 4: mod_base = OTHER; note = 2'-deoxy-2'-fluorouridine-3'-phosphate
  modified_base 5: mod_base = OTHER; note = 2'-O-methyladenosine-3'-phosphate
  modified_base 6: mod_base = OTHER; note = 2'-deoxy-2'-fluorocytidine-3'-phosphate
  modified_base 7: mod_base = OTHER; note = 2'-O-methylcytidine-3'-phosphate
  modified_base 8: mod_base = OTHER; note = 2'-O-methylcytidine-3'-phosphate
  modified_base 9: mod_base = OTHER; note = 2'-O-methyluridine-3'-phosphate
  modified_base 10: mod_base = OTHER; note = 2'-deoxy-2'-fluoroadenosine-3'-phosphate
  modified_base 11: mod_base = OTHER; note = 2'-O-methylguanosine-3'-phosphate
  modified_base 12: mod_base = OTHER; note = 2'-O-methylguanosine-3'-phosphate
  modified_base 13: mod_base = OTHER; note = 2'-O-methyladenosine-3'-phosphate
  modified_base 14: mod_base = OTHER; note = 2'-deoxy-2'-fluoroadenosine-3'-phosphate
  modified_base 15: mod_base = OTHER; note = 2'-O-methyladenosine-3'-phosphate
  modified_base 16: mod_base = OTHER; note = 2'-deoxy-2'-fluorouridine-3'-phosphate
  modified_base 17: mod_base = OTHER; note = 2'-O-methyladenosine-3'-phosphate
  modified_base 18: mod_base = OTHER; note = 2'-deoxy-2'-fluorocytidine-3'-phosphate
  modified_base 19: mod_base = OTHER; note = 2'-O-methylcytidine-3'-phosphate
  modified_base 20: mod_base = OTHER; note = 2'-deoxy-2'-fluoroadenosine-3'-phosphate
  modified_base 21: mod_base = OTHER; note = 2'-O-methylguanosine-3'-phosphorothioate
  modified_base 22: mod_base = OTHER; note = 2'-O-methyladenosine-3'-phosphorothioate
  modified_base 23: mod_base = OTHER; note = 2'-O-methylguanosine
ttgtaccctaggaaataccagag

SEQ ID NO: 550 - RNA, 21 nt, synthetic construct
  source 1..21: mol_type = other RNA
  modified_base 1: mod_base = OTHER; note = 2'-O-methyluridine-3'-phosphorothioate 5'phosphate
  modified_base 2: mod_base = OTHER; note = 2'-deoxy-2'-fluorouridine-3'-phosphorothioate
  modified_base 3: mod_base = OTHER; note = 2'-O-methylguanosine-3'-phosphate
  modified_base 4: mod_base = OTHER; note = 2'-deoxy-2'-fluorouridine-3'-phosphate
  modified_base 5: mod_base = OTHER; note = 2'-O-methyladenosine-3'-phosphate
  modified_base 6: mod_base = OTHER; note = 2'-deoxy-2'-fluorocytidine-3'-phosphate
  modified_base 7: mod_base = OTHER; note = 2'-O-methylcytidine-3'-phosphate
  modified_base 8: mod_base = OTHER; note = 2'-deoxy-2'-fluorocytidine-3'-phosphate
  modified_base 9: mod_base = OTHER; note = 2'-O-methyluridine-3'-phosphate
  modified_base 10: mod_base = OTHER; note = 2'-deoxy-2'-fluoroadenosine-3'-phosphate
  modified_base 11: mod_base = OTHER; note = 2'-O-methylguanosine-3'-phosphate
  modified_base 12: mod_base = OTHER; note = 2'-O-methylguanosine-3'-phosphate
  modified_base 13: mod_base = OTHER; note = 2'-O-methyladenosine-3'-phosphate
  modified_base 14: mod_base = OTHER; note = 2'-deoxy-2'-fluoroadenosine-3'-phosphate
  modified_base 15: mod_base = OTHER; note = 2'-O-methyladenosine-3'-phosphate
  modified_base 16: mod_base = OTHER; note = 2'-deoxy-2'-fluorouridine-3'-phosphate
  modified_base 17: mod_base = OTHER; note = 2'-O-methyladenosine-3'-phosphate
  modified_base 18: mod_base = OTHER; note = 2'-deoxy-2'-fluorocytidine-3'-phosphate
  modified_base 19: mod_base = OTHER; note = 2'-O-methylcytidine-3'-phosphorothioate
  modified_base 20: mod_base = OTHER; note = 2'-O-methyladenosine-3'-phosphorothioate
  modified_base 21: mod_base = OTHER; note = 2'-O-methylguanosine
ttgtaccctaggaaataccag

SEQ ID NO: 551 - RNA, 23 nt, synthetic construct
  source 1..23: mol_type = other RNA
  modified_base 1: mod_base = OTHER; note = 2'-O-methyluridine-3'-phosphorothioate
  modified_base 2: mod_base = OTHER; note = 2'-deoxy-2'-fluorouridine-3'-phosphorothioate
  modified_base 3: mod_base = OTHER; note = 2'-O-methylguanosine-3'-phosphate
  modified_base 4: mod_base = OTHER; note = 2'-deoxy-2'-fluorouridine-3'-phosphate
  modified_base 5: mod_base = OTHER; note = 2'-O-methyladenosine-3'-phosphate
  modified_base 6: mod_base = OTHER; note = 2'-deoxy-2'-fluorocytidine-3'-phosphate
  modified_base 7: mod_base = OTHER; note = 2'-O-methylcytidine-3'-phosphate
  modified_base 8: mod_base = OTHER; note = 2'-deoxy-2'-fluorocytidine-3'-phosphate
  modified_base 9: mod_base = OTHER; note = 2'-O-methyluridine-3'-phosphate
  modified_base 10: mod_base = OTHER; note = 2'-deoxy-2'-fluoroadenosine-3'-phosphate
  modified_base 11: mod_base = OTHER; note = 2'-O-methylguanosine-3'-phosphate
  modified_base 12: mod_base = OTHER; note = 2'-O-methylguanosine-3'-phosphate
  modified_base 13: mod_base = OTHER; note = 2'-O-methyladenosine-3'-phosphate
  modified_base 14: mod_base = OTHER; note = 2'-deoxy-2'-fluoroadenosine-3'-phosphate
  modified_base 15: mod_base = OTHER; note = 2'-O-methyladenosine-3'-phosphate
  modified_base 16: mod_base = OTHER; note = 2'-deoxy-2'-fluorouridine-3'-phosphate
  modified_base 17: mod_base = OTHER; note = 2'-O-methyladenosine-3'-phosphate
  modified_base 18: mod_base = OTHER; note = 2'-O-methylcytidine-3'-phosphate
  modified_base 19: mod_base = OTHER; note = 2'-O-methylcytidine-3'-phosphate
  modified_base 20: mod_base = OTHER; note = 2'-O-methyladenosine-3'-phosphate
  modified_base 21: mod_base = OTHER; note = 2'-O-methylguanosine-3'-phosphorothioate
  modified_base 22: mod_base = OTHER; note = 2'-O-methyladenosine-3'-phosphorothioate
  modified_base 23: mod_base = OTHER; note = 2'-O-methylguanosine
ttgtaccctaggaaataccagag

SEQ ID NO: 552 - RNA, 23 nt, synthetic construct
  source 1..23: mol_type = other RNA
  modified_base 1: mod_base = OTHER; note = 2'-O-methyluridine-3'-phosphorothioate
  modified_base 2: mod_base = OTHER; note = 2'-deoxy-2'-fluorouridine-3'-phosphorothioate
  modified_base 3: mod_base = OTHER; note = 2'-O-methylguanosine-3'-phosphate
  modified_base 4: mod_base = OTHER; note = 2'-deoxy-2'-fluorouridine-3'-phosphate
  modified_base 5: mod_base = OTHER; note = 2'-O-methyladenosine-3'-phosphate
  modified_base 6: mod_base = OTHER; note = 2'-O-methylcytidine-3'-phosphate
  modified_base 7: mod_base = OTHER; note = 2'-O-methylcytidine-3'-phosphate
  modified_base 8: mod_base = OTHER; note = 2'-deoxy-2'-fluorocytidine-3'-phosphate
  modified_base 9: mod_base = OTHER; note = 2'-O-methyluridine-3'-phosphate
  modified_base 10: mod_base = OTHER; note = 2'-O-methyladenosine-3'-phosphate
  modified_base 11: mod_base = OTHER; note = 2'-O-methylguanosine-3'-phosphate
  modified_base 12: mod_base = OTHER; note = 2'-O-methylguanosine-3'-phosphate
  modified_base 13: mod_base = OTHER; note = 2'-O-methyladenosine-3'-phosphate
  modified_base 14: mod_base = OTHER; note = 2'-deoxy-2'-fluoroadenosine-3'-phosphate
  modified_base 15: mod_base = OTHER; note = 2'-O-methyladenosine-3'-phosphate
  modified_base 16: mod_base = OTHER; note = 2'-deoxy-2'-fluorouridine-3'-phosphate
  modified_base 17: mod_base = OTHER; note = 2'-O-methyladenosine-3'-phosphate
  modified_base 18: mod_base = OTHER; note = 2'-O-methylcytidine-3'-phosphate
  modified_base 19: mod_base = OTHER; note = 2'-O-methylcytidine-3'-phosphate
  modified_base 20: mod_base = OTHER; note = 2'-deoxy-2'-fluoroadenosine-3'-phosphate
  modified_base 21: mod_base = OTHER; note = 2'-O-methylguanosine-3'-phosphorothioate
  modified_base 22: mod_base = OTHER; note = 2'-O-methyladenosine-3'-phosphorothioate
  modified_base 23: mod_base = OTHER; note = 2'-O-methylguanosine
ttgtaccctaggaaataccagag

SEQ ID NO: 553 - RNA, 23 nt, synthetic construct
  source 1..23: mol_type = other RNA
  modified_base 1: mod_base = OTHER; note = 2'-O-methyluridine-3'-phosphorothioate
  modified_base 2: mod_base = OTHER; note = 2'-deoxy-2'-fluorouridine-3'-phosphorothioate
  modified_base 3: mod_base = OTHER; note = 2'-O-methylguanosine-3'-phosphate
  modified_base 4: mod_base = OTHER; note = 2'-O-methyluridine-3'-phosphate
  modified_base 5: mod_base = OTHER; note = 2'-O-methyladenosine-3'-phosphate
  modified_base 6: mod_base = OTHER; note = 2'-deoxy-2'-fluorocytidine-3'-phosphate
  modified_base 7: mod_base = OTHER; note = 2'-O-methylcytidine-3'-phosphate
  modified_base 8: mod_base = OTHER; note = 2'-O-methylcytidine-3'-phosphate
  modified_base 9: mod_base = OTHER; note = 2'-deoxy-2'-fluorouridine-3'-phosphate
  modified_base 10: mod_base = OTHER; note = 2'-O-methyladenosine-3'-phosphate
  modified_base 11: mod_base = OTHER; note = 2'-O-methylguanosine-3'-phosphate
  modified_base 12: mod_base = OTHER; note = 2'-O-methylguanosine-3'-phosphate
  modified_base 13: mod_base = OTHER; note = 2'-O-methyladenosine-3'-phosphate
  modified_base 14: mod_base = OTHER; note = 2'-deoxy-2'-fluoroadenosine-3'-phosphate
  modified_base 15: mod_base = OTHER; note = 2'-O-methyladenosine-3'-phosphate
  modified_base 16: mod_base = OTHER; note = 2'-deoxy-2'-fluorouridine-3'-phosphate
  modified_base 17: mod_base = OTHER; note = 2'-O-methyladenosine-3'-phosphate
  modified_base 18: mod_base = OTHER; note = 2'-O-methylcytidine-3'-phosphate
  modified_base 19: mod_base = OTHER; note = 2'-O-methylcytidine-3'-phosphate
  modified_base 20: mod_base = OTHER; note = 2'-O-methyladenosine-3'-phosphate
  modified_base 21: mod_base = OTHER; note = 2'-O-methylguanosine-3'-phosphorothioate
  modified_base 22: mod_base = OTHER; note = 2'-O-methyladenosine-3'-phosphorothioate
  modified_base 23: mod_base = OTHER; note = 2'-O-methylguanosine
ttgtaccctaggaaataccagag

SEQ ID NO: 554 - RNA, 23 nt, synthetic construct
  source 1..23: mol_type = other RNA
  modified_base 1: mod_base = OTHER; note = 2'-O-methyluridine-3'-phosphorothioate
  modified_base 2: mod_base = OTHER; note = 2'-deoxy-2'-fluorouridine-3'-phosphorothioate
  modified_base 3: mod_base = OTHER; note = 2'-deoxy-2'-fluoroguanosine-3'-phosphate
  modified_base 4: mod_base = OTHER; note = 2'-O-methyluridine-3'-phosphate
  modified_base 5: mod_base = OTHER; note = 2'-O-methyladenosine-3'-phosphate
  modified_base 6: mod_base = OTHER; note = 2'-deoxy-2'-fluorocytidine-3'-phosphate
  modified_base 7: mod_base = OTHER; note = 2'-O-methylcytidine-3'-phosphate
  modified_base 8: mod_base = OTHER; note = 2'-deoxy-2'-fluorocytidine-3'-phosphate
  modified_base 9: mod_base = OTHER; note = 2'-O-methyluridine-3'-phosphate
  modified_base 10: mod_base = OTHER; note = 2'-deoxy-2'-fluoroadenosine-3'-phosphate
  modified_base 11: mod_base = OTHER; note = 2'-O-methylguanosine-3'-phosphate
  modified_base 12: mod_base = OTHER; note = 2'-O-methylguanosine-3'-phosphate
  modified_base 13: mod_base = OTHER; note = 2'-O-methyladenosine-3'-phosphate
  modified_base 14: mod_base = OTHER; note = 2'-deoxy-2'-fluoroadenosine-3'-phosphate
  modified_base 15: mod_base = OTHER; note = 2'-deoxy-2'-fluoroadenosine-3'-phosphate
  modified_base 16: mod_base = OTHER; note = 2'-O-methyluridine-3'-phosphate
  modified_base 17: mod_base = OTHER; note = 2'-O-methyladenosine-3'-phosphate
  modified_base 18: mod_base = OTHER; note = 2'-deoxy-2'-fluorocytidine-3'-phosphate
  modified_base 19: mod_base = OTHER; note = 2'-O-methylcytidine-3'-phosphate
  modified_base 20: mod_base = OTHER; note = 2'-deoxy-2'-fluoroadenosine-3'-phosphate
  modified_base 21: mod_base = OTHER; note = 2'-O-methylguanosine-3'-phosphorothioate
  modified_base 22: mod_base = OTHER; note = 2'-O-methyladenosine-3'-phosphorothioate
  modified_base 23: mod_base = OTHER; note = 2'-O-methylguanosine
ttgtaccctaggaaataccagag

SEQ ID NO: 555 - RNA, 23 nt, synthetic construct
  source 1..23: mol_type = other RNA
  modified_base 1: mod_base = OTHER; note = 2'-O-methyluridine-3'-phosphorothioate
  modified_base 2: mod_base = OTHER; note = 2'-deoxy-2'-fluorouridine-3'-phosphorothioate
  modified_base 3: mod_base = OTHER; note = 2'-O-methylguanosine-3'-phosphate
  modified_base 4: mod_base = OTHER; note = 2'-deoxy-2'-fluorouridine-3'-phosphate
  modified_base 5: mod_base = OTHER; note = 2'-O-methyladenosine-3'-phosphate
  modified_base 6: mod_base = OTHER; note = 2'-deoxy-2'-fluorocytidine-3'-phosphate
  modified_base 7: mod_base = OTHER; note = 2'-O-methylcytidine-3'-phosphate
  modified_base 8: mod_base = OTHER; note = 2'-deoxy-2'-fluorocytidine-3'-phosphate
  modified_base 9: mod_base = OTHER; note = 2'-O-methyluridine-3'-phosphate
  modified_base 10: mod_base = OTHER; note = 2'-deoxy-2'-fluoroadenosine-3'-phosphate
  modified_base 11: mod_base = OTHER; note = 2'-O-methylguanosine-3'-phosphate
  modified_base 12: mod_base = OTHER; note = 2'-O-methylguanosine-3'-phosphate
  modified_base 13: mod_base = OTHER; note = 2'-O-methyladenosine-3'-phosphate
  modified_base 14: mod_base = OTHER; note = 2'-deoxy-2'-fluoroadenosine-3'-phosphate
  modified_base 15: mod_base = OTHER; note = 2'-O-methyladenosine-3'-phosphate
  modified_base 16: mod_base = OTHER; note = 2'-deoxy-2'-fluorouridine-3'-phosphate
  modified_base 17: mod_base = OTHER; note = 2'-O-methyladenosine-3'-phosphate
  modified_base 18: mod_base = OTHER; note = 2'-deoxy-2'-fluorocytidine-3'-phosphate
  modified_base 19: mod_base = OTHER; note = 2'-O-methylcytidine-3'-phosphate
  modified_base 20: mod_base = OTHER; note = 2'-deoxy-2'-fluoroadenosine-3'-phosphate
  modified_base 21: mod_base = OTHER; note = 2'-O-methylguanosine-3'-phosphorothioate
  modified_base 22: mod_base = OTHER; note = 2'-O-methyladenosine-3'-phosphorothioate
  modified_base 23: mod_base = OTHER; note = 2'-O-methylguanosine
ttgtaccctaggaaataccagag

SEQ ID NO: 556 - RNA, 23 nt, synthetic construct
  source 1..23: mol_type = other RNA
  modified_base 1: mod_base = OTHER; note = 2'-O-methyluridine-3'-phosphorothioate
  modified_base 2: mod_base = OTHER; note = 2'-deoxy-2'-fluorouridine-3'-phosphorothioate
  modified_base 3: mod_base = OTHER; note = 2'-O-methylguanosine-3'-phosphate
  modified_base 4: mod_base = OTHER; note = 2'-O-methyluridine-3'-phosphate
  modified_base 5: mod_base = OTHER; note = 2'-O-methyladenosine-3'-phosphate
  modified_base 6: mod_base = OTHER; note = 2'-deoxy-2'-fluorocytidine-3'-phosphate
  modified_base 7: mod_base = OTHER; note = 2'-O-methylcytidine-3'-phosphate
  modified_base 8: mod_base = OTHER; note = 2'-O-methylcytidine-3'-phosphate
  modified_base 9: mod_base = OTHER; note = 2'-O-methyluridine-3'-phosphate
  modified_base 10: mod_base = OTHER; note = 2'-O-methyladenosine-3'-phosphate
  modified_base 11: mod_base = OTHER; note = 2'-O-methylguanosine-3'-phosphate
  modified_base 12: mod_base = OTHER; note = 2'-O-methylguanosine-3'-phosphate
  modified_base 13: mod_base = OTHER; note = 2'-O-methyladenosine-3'-phosphate
  modified_base 14: mod_base = OTHER; note = 2'-deoxy-2'-fluoroadenosine-3'-phosphate
  modified_base 15: mod_base = OTHER; note = 2'-O-methyladenosine-3'-phosphate
  modified_base 16: mod_base = OTHER; note = 2'-deoxy-2'-fluorouridine-3'-phosphate
  modified_base 17: mod_base = OTHER; note = 2'-O-methyladenosine-3'-phosphate
  modified_base 18: mod_base = OTHER; note = 2'-O-methylcytidine-3'-phosphate
  modified_base 19: mod_base = OTHER; note = 2'-O-methylcytidine-3'-phosphate
  modified_base 20: mod_base = OTHER; note = 2'-O-methyladenosine-3'-phosphate
  modified_base 21: mod_base = OTHER; note = 2'-O-methylguanosine-3'-phosphorothioate
  modified_base 22: mod_base = OTHER; note = 2'-O-methyladenosine-3'-phosphorothioate
  modified_base 23: mod_base = OTHER; note = 2'-O-methylguanosine
ttgtaccctaggaaataccagag

SEQ ID NO: 557 - RNA, 23 nt, synthetic construct
  source 1..23: mol_type = other RNA
  modified_base 1: mod_base = OTHER; note = 2'-O-methyluridine-3'-phosphorothioate
  modified_base 2: mod_base = OTHER; note = 2'-deoxy-2'-fluorouridine-3'-phosphorothioate
  modified_base 3: mod_base = OTHER; note = 2'-deoxy-2'-fluoroguanosine-3'-phosphate
  modified_base 4: mod_base = OTHER; note = 2'-O-methyluridine-3'-phosphate
  modified_base 5: mod_base = OTHER; note = 2'-O-methyladenosine-3'-phosphate
  modified_base 6: mod_base = OTHER; note = 2'-deoxy-2'-fluorocytidine-3'-phosphate
  modified_base 7: mod_base = OTHER; note = 2'-O-methylcytidine-3'-phosphate
  modified_base 8: mod_base = OTHER; note = 2'-deoxy-2'-fluorocytidine-3'-phosphate
  modified_base 9: mod_base = OTHER; note = 2'-O-methyluridine-3'-phosphate
  modified_base 10: mod_base = OTHER; note = 2'-deoxy-2'-fluoroadenosine-3'-phosphate
  modified_base 11: mod_base = OTHER; note = 2'-O-methylguanosine-3'-phosphate
  modified_base 12: mod_base = OTHER; note = 2'-O-methylguanosine-3'-phosphate
  modified_base 13: mod_base = OTHER; note = 2'-O-methyladenosine-3'-phosphate
  modified_base 14: mod_base = OTHER; note = 2'-deoxy-2'-fluoroadenosine-3'-phosphate
  modified_base 15: mod_base = OTHER; note = 2'-O-methyladenosine-3'-phosphate
  modified_base 16: mod_base = OTHER; note = 2'-deoxy-2'-fluorouridine-3'-phosphate
  modified_base 17: mod_base = OTHER; note = 2'-O-methyladenosine-3'-phosphate
  modified_base 18: mod_base = OTHER; note = 2'-deoxy-2'-fluorocytidine-3'-phosphate
  modified_base 19: mod_base = OTHER; note = 2'-O-methylcytidine-3'-phosphate
  modified_base 20: mod_base = OTHER; note = 2'-deoxy-2'-fluoroadenosine-3'-phosphate
  modified_base 21: mod_base = OTHER; note = 2'-O-methylguanosine-3'-phosphorothioate
  modified_base 22: mod_base = OTHER; note = 2'-O-methyladenosine-3'-phosphorothioate
  modified_base 23: mod_base = OTHER; note = 2'-O-methylguanosine
ttgtaccctaggaaataccagag

SEQ ID NO: 558 - RNA, 23 nt, synthetic construct
  source 1..23: mol_type = other RNA
  modified_base 1: mod_base = OTHER; note = 2'-O-methyluridine-3'-phosphorothioate
  modified_base 2: mod_base = OTHER; note = 2'-deoxy-2'-fluorouridine-3'-phosphorothioate
  modified_base 3: mod_base = OTHER; note = 2'-O-methylguanosine-3'-phosphate
  modified_base 4: mod_base = OTHER; note = 2'-deoxy-2'-fluorouridine-3'-phosphate
  modified_base 5: mod_base = OTHER; note = 2'-O-methyladenosine-3'-phosphate
  modified_base 6: mod_base = OTHER; note = 2'-O-methylcytidine-3'-phosphate
  modified_base 7: mod_base = OTHER; note = 2'-O-methylcytidine-3'-phosphate
  modified_base 8: mod_base = OTHER; note = 2'-deoxy-2'-fluorocytidine-3'-phosphate
  modified_base 9: mod_base = OTHER; note = 2'-O-methyluridine-3'-phosphate
  modified_base 10: mod_base = OTHER; note = 2'-deoxy-2'-fluoroadenosine-3'-phosphate
  modified_base 11: mod_base = OTHER; note = 2'-O-methylguanosine-3'-phosphate
  modified_base 12: mod_base = OTHER; note = 2'-O-methylguanosine-3'-phosphate
  modified_base 13: mod_base = OTHER; note = 2'-O-methyladenosine-3'-phosphate
  modified_base 14: mod_base = OTHER; note = 2'-deoxy-2'-fluoroadenosine-3'-phosphate
  modified_base 15: mod_base = OTHER; note = 2'-O-methyladenosine-3'-phosphate
  modified_base 16: mod_base = OTHER; note = 2'-deoxy-2'-fluorouridine-3'-phosphate
  modified_base 17: mod_base = OTHER; note = 2'-O-methyladenosine-3'-phosphate
  modified_base 18: mod_base = OTHER; note = 2'-O-methylcytidine-3'-phosphate
  modified_base 19: mod_base = OTHER; note = 2'-O-methylcytidine-3'-phosphate
  modified_base 20: mod_base = OTHER; note = 2'-deoxy-2'-fluoroadenosine-3'-phosphate
  modified_base 21: mod_base = OTHER; note = 2'-O-methylguanosine-3'-phosphorothioate
  modified_base 22: mod_base = OTHER; note = 2'-O-methyladenosine-3'-phosphorothioate
  modified_base 23: mod_base = OTHER; note = 2'-O-methylguanosine
ttgtaccctaggaaataccagag

SEQ ID NO: 559 - RNA, 23 nt, synthetic construct
  source 1..23: mol_type = other RNA
  modified_base 1: mod_base = OTHER; note = 2'-O-methyluridine-3'-phosphorothioate
  modified_base 2: mod_base = OTHER; note = 2'-deoxy-2'-fluorouridine-3'-phosphorothioate
  modified_base 3: mod_base = OTHER; note = 2'-O-methylguanosine-3'-phosphate
  modified_base 4: mod_base = OTHER; note = 2'-O-methyluridine-3'-phosphate
  modified_base 5: mod_base = OTHER; note = 2'-O-methyladenosine-3'-phosphate
  modified_base 6: mod_base = OTHER; note = 2'-deoxy-2'-fluorocytidine-3'-phosphate
  modified_base 7: mod_base = OTHER; note = 2'-O-methylcytidine-3'-phosphate
  modified_base 8: mod_base = OTHER; note = 2'-O-methylcytidine-3'-phosphate
  modified_base 9: mod_base = OTHER; note = 2'-deoxy-2'-fluorouridine-3'-phosphate
  modified_base 10: mod_base = OTHER; note = 2'-O-methyladenosine-3'-phosphate
  modified_base 11: mod_base = OTHER; note = 2'-O-methylguanosine-3'-phosphate
  modified_base 12: mod_base = OTHER; note = 2'-O-methylguanosine-3'-phosphate
  modified_base 13: mod_base = OTHER; note = 2'-O-methyladenosine-3'-phosphate
  modified_base 14: mod_base = OTHER; note = 2'-deoxy-2'-fluoroadenosine-3'-phosphate
  modified_base 15: mod_base = OTHER; note = 2'-O-methyladenosine-3'-phosphate
  modified_base 16: mod_base = OTHER; note = 2'-deoxy-2'-fluorouridine-3'-phosphate
  modified_base 17: mod_base = OTHER; note = 2'-O-methyladenosine-3'-phosphate
  modified_base 18: mod_base = OTHER; note = 2'-O-methylcytidine-3'-phosphate
  modified_base 19: mod_base = OTHER; note = 2'-O-methylcytidine-3'-phosphate
  modified_base 20: mod_base = OTHER; note = 2'-O-methyladenosine-3'-phosphate
  modified_base 21: mod_base = OTHER; note = 2'-O-methylguanosine-3'-phosphorothioate
  modified_base 22: mod_base = OTHER; note = 2'-O-methyladenosine-3'-phosphorothioate
  modified_base 23: mod_base = OTHER; note = 2'-O-methylguanosine
ttgtaccctaggaaataccagag

SEQ ID NO: 560 - RNA, 23 nt, synthetic construct
  source 1..23: mol_type = other RNA
  modified_base 1: mod_base = OTHER; note = 2'-O-methyluridine-3'-phosphorothioate
  modified_base 2: mod_base = OTHER; note = 2'-deoxy-2'-fluorouridine-3'-phosphorothioate
  modified_base 3: mod_base = OTHER; note = 2'-O-methylguanosine-3'-phosphate
  modified_base 4: mod_base = OTHER; note = 2'-O-methyluridine-3'-phosphate
  modified_base 5: mod_base = OTHER; note = 2'-O-methyladenosine-3'-phosphate
  modified_base 6: mod_base = OTHER; note = 2'-deoxy-2'-fluorocytidine-3'-phosphate
  modified_base 7: mod_base = OTHER; note = 2'-O-methylcytidine-3'-phosphate
  modified_base 8: mod_base = OTHER; note = 2'-deoxy-2'-fluorocytidine-3'-phosphate
  modified_base 9: mod_base = OTHER; note = 2'-deoxy-2'-fluorouridine-3'-phosphate
  modified_base 10: mod_base = OTHER; note = 2'-O-methyladenosine-3'-phosphate
  modified_base 11: mod_base = OTHER; note = 2'-O-methylguanosine-3'-phosphate
  modified_base 12: mod_base = OTHER; note = 2'-O-methylguanosine-3'-phosphate
  modified_base 13: mod_base = OTHER; note = 2'-O-methyladenosine-3'-phosphate
  modified_base 14: mod_base = OTHER; note = 2'-deoxy-2'-fluoroadenosine-3'-phosphate
  modified_base 15: mod_base = OTHER; note = 2'-O-methyladenosine-3'-phosphate
  modified_base 16: mod_base = OTHER; note = 2'-deoxy-2'-fluorouridine-3'-phosphate
  modified_base 17: mod_base = OTHER; note = 2'-O-methyladenosine-3'-phosphate
  modified_base 18: mod_base = OTHER; note = 2'-O-methylcytidine-3'-phosphate
  modified_base 19: mod_base = OTHER; note = 2'-O-methylcytidine-3'-phosphate
  modified_base 20: mod_base = OTHER; note = 2'-O-methyladenosine-3'-phosphate
  modified_base 21: mod_base = OTHER; note = 2'-O-methylguanosine-3'-phosphorothioate
  modified_base 22: mod_base = OTHER; note = 2'-O-methyladenosine-3'-phosphorothioate
  modified_base 23: mod_base = OTHER; note = 2'-O-methylguanosine
ttgtaccctaggaaataccagag

SEQ ID NO: 561 - RNA, 23 nt, synthetic construct
  source 1..23: mol_type = other RNA
  modified_base 1: mod_base = OTHER; note = 2'-O-methyluridine-3'-phosphorothioate
  modified_base 2: mod_base = OTHER; note = 2'-deoxy-2'-fluorouridine-3'-phosphorothioate
  modified_base 3: mod_base = OTHER; note = 2'-deoxy-2'-fluoroguanosine-3'-phosphate
  modified_base 4: mod_base = OTHER; note = 2'-O-methyluridine-3'-phosphate
  modified_base 5: mod_base = OTHER; note = 2'-deoxy-2'-fluoroadenosine-3'-phosphate
  modified_base 6: mod_base = OTHER; note = 2'-deoxy-2'-fluorocytidine-3'-phosphate
  modified_base 7: mod_base = OTHER; note = 2'-O-methylcytidine-3'-phosphate
  modified_base 8: mod_base = OTHER; note = 2'-deoxy-2'-fluorocytidine-3'-phosphate
  modified_base 9: mod_base = OTHER; note = 2'-O-methyluridine-3'-phosphate
  modified_base 10: mod_base = OTHER; note = 2'-deoxy-2'-fluoroadenosine-3'-phosphate
  modified_base 11: mod_base = OTHER; note = 2'-O-methylguanosine-3'-phosphate
  modified_base 12: mod_base = OTHER; note = 2'-O-methylguanosine-3'-phosphate
  modified_base 13: mod_base = OTHER; note = 2'-O-methyladenosine-3'-phosphate
  modified_base 14: mod_base = OTHER; note = 2'-deoxy-2'-fluoroadenosine-3'-phosphate
  modified_base 15: mod_base = OTHER; note = 2'-deoxy-2'-fluoroadenosine-3'-phosphate
  modified_base 16: mod_base = OTHER; note = 2'-O-methyluridine-3'-phosphate
  modified_base 17: mod_base = OTHER; note = 2'-O-methyladenosine-3'-phosphate
  modified_base 18: mod_base = OTHER; note = 2'-deoxy-2'-fluorocytidine-3'-phosphate
  modified_base 19: mod_base = OTHER; note = 2'-O-methylcytidine-3'-phosphate
  modified_base 20: mod_base = OTHER; note = 2'-deoxy-2'-fluoroadenosine-3'-phosphate
  modified_base 21: mod_base = OTHER; note = 2'-O-methylguanosine-3'-phosphorothioate
  modified_base 22: mod_base = OTHER; note = 2'-O-methyladenosine-3'-phosphorothioate
  modified_base 23: mod_base = OTHER; note = 2'-O-methylguanosine
ttgtaccctaggaaataccagag

SEQ ID NO: 562 - RNA, 23 nt, synthetic construct
  source 1..23: mol_type = other RNA
  modified_base 1: mod_base = OTHER; note = 2'-O-methyluridine-3'-phosphorothioate
  modified_base 2: mod_base = OTHER; note = 2'-deoxy-2'-fluorouridine-3'-phosphorothioate
  modified_base 3: mod_base = OTHER; note = 2'-O-methylguanosine-3'-phosphate
  modified_base 4: mod_base = OTHER; note = 2'-deoxy-2'-fluorouridine-3'-phosphate
  modified_base 5: mod_base = OTHER; note = 2'-O-methyladenosine-3'-phosphate
  modified_base 6: mod_base = OTHER; note = 2'-deoxy-2'-fluorocytidine-3'-phosphate
  modified_base 7: mod_base = OTHER; note = 2'-O-methylcytidine-3'-phosphate
  modified_base 8: mod_base = OTHER; note = 2'-deoxy-2'-fluorocytidine-3'-phosphate
  modified_base 9: mod_base = OTHER; note = 2'-O-methyluridine-3'-phosphate
  modified_base 10: mod_base = OTHER; note = 2'-deoxy-2'-fluoroadenosine-3'-phosphate
  modified_base 11: mod_base = OTHER; note = 2'-O-methylguanosine-3'-phosphate
  modified_base 12: mod_base = OTHER; note = 2'-O-methylguanosine-3'-phosphate
  modified_base 13: mod_base = OTHER; note = 2'-O-methyladenosine-3'-phosphate
  modified_base 14: mod_base = OTHER; note = 2'-deoxy-2'-fluoroadenosine-3'-phosphate
  modified_base 15: mod_base = OTHER; note = 2'-O-methyladenosine-3'-phosphate
  modified_base 16: mod_base = OTHER; note = 2'-deoxy-2'-fluorouridine-3'-phosphate
  modified_base 17: mod_base = OTHER; note = 2'-O-methyladenosine-3'-phosphate
  modified_base 18: mod_base = OTHER; note = 2'-deoxy-2'-fluorocytidine-3'-phosphate
  modified_base 19: mod_base = OTHER; note = 2'-O-methylcytidine-3'-phosphate
  modified_base 20: mod_base = OTHER; note = 2'-deoxy-2'-fluoroadenosine-3'-phosphate
  modified_base 21: mod_base = OTHER; note = 2'-O-methylguanosine-3'-phosphorothioate
  modified_base 22: mod_base = OTHER; note = 2'-O-methyladenosine-3'-phosphorothioate
  modified_base 23: mod_base = OTHER; note = 2'-O-methylguanosine
ttgtaccctaggaaataccagag

SEQ ID NO: 563 - RNA, 23 nt, synthetic construct
  source 1..23: mol_type = other RNA
  modified_base 1: mod_base = OTHER; note = 2'-O-methyluridine-3'-phosphorothioate
  modified_base 2: mod_base = OTHER; note = 2'-deoxy-2'-fluorouridine-3'-phosphorothioate
  modified_base 3: mod_base = OTHER; note = 2'-O-methylguanosine-3'-phosphate
  modified_base 4: mod_base = OTHER; note = 2'-deoxy-2'-fluorouridine-3'-phosphate
  modified_base 5: mod_base = OTHER; note = 2'-O-methyladenosine-3'-phosphate
  modified_base 6: mod_base = OTHER; note = 2'-O-methylcytidine-3'-phosphate
  modified_base 7: mod_base = OTHER; note = 2'-O-methylcytidine-3'-phosphate
  modified_base 8: mod_base = OTHER; note = 2'-O-methylcytidine-3'-phosphate
  modified_base 9: mod_base = OTHER; note = 2'-O-methyluridine-3'-phosphate
  modified_base 10: mod_base = OTHER; note = 2'-deoxy-2'-fluoroadenosine-3'-phosphate
  modified_base 11: mod_base = OTHER; note = 2'-O-methylguanosine-3'-phosphate
  modified_base 12: mod_base = OTHER; note = 2'-O-methylguanosine-3'-phosphate
  modified_base 13: mod_base = OTHER; note = 2'-O-methyladenosine-3'-phosphate
  modified_base 14: mod_base = OTHER; note = 2'-deoxy-2'-fluoroadenosine-3'-phosphate
  modified_base 15: mod_base = OTHER; note = 2'-O-methyladenosine-3'-phosphate
  modified_base 16: mod_base = OTHER; note = 2'-deoxy-2'-fluorouridine-3'-phosphate
  modified_base 17: mod_base = OTHER; note = 2'-O-methyladenosine-3'-phosphate
  modified_base 18: mod_base = OTHER; note = 2'-O-methylcytidine-3'-phosphate
  modified_base 19: mod_base = OTHER; note = 2'-O-methylcytidine-3'-phosphate
  modified_base 20: mod_base = OTHER; note = 2'-deoxy-2'-fluoroadenosine-3'-phosphate
  modified_base 21: mod_base = OTHER; note = 2'-O-methylguanosine-3'-phosphorothioate
  modified_base 22: mod_base = OTHER; note = 2'-O-methyladenosine-3'-phosphorothioate
  modified_base 23: mod_base = OTHER; note = 2'-O-methylguanosine
ttgtaccctaggaaataccagag

SEQ ID NO: 564 - RNA, 23 nt, synthetic construct
  source 1..23: mol_type = other RNA
  modified_base 1: mod_base = OTHER; note = 2'-O-methyluridine-3'-phosphorothioate
  modified_base 2: mod_base = OTHER; note = 2'-deoxy-2'-fluorouridine-3'-phosphorothioate
  modified_base 3: mod_base = OTHER; note = 2'-deoxy-2'-fluoroguanosine-3'-phosphate
  modified_base 4: mod_base = OTHER; note = 2'-O-methyluridine-3'-phosphate
  modified_base 5: mod_base = OTHER; note = 2'-O-methyladenosine-3'-phosphate
  modified_base 6: mod_base = OTHER; note = 2'-deoxy-2'-fluorocytidine-3'-phosphate
  modified_base 7: mod_base = OTHER; note = 2'-O-methylcytidine-3'-phosphate
  modified_base 8: mod_base = OTHER; note = 2'-deoxy-2'-fluorocytidine-3'-phosphate
  modified_base 9: mod_base = OTHER; note = 2'-O-methyluridine-3'-phosphate
  modified_base 10: mod_base = OTHER; note = 2'-deoxy-2'-fluoroadenosine-3'-phosphate
  modified_base 11: mod_base = OTHER; note = 2'-O-methylguanosine-3'-phosphate
  modified_base 12: mod_base = OTHER; note = 2'-O-methylguanosine-3'-phosphate
  modified_base 13: mod_base = OTHER; note = 2'-O-methyladenosine-3'-phosphate
  modified_base 14: mod_base = OTHER; note = 2'-deoxy-2'-fluoroadenosine-3'-phosphate
  modified_base 15: mod_base = OTHER; note = 2'-deoxy-2'-fluoroadenosine-3'-phosphate
  modified_base 16: mod_base = OTHER; note = 2'-O-methyluridine-3'-phosphate
  modified_base 17: mod_base = OTHER; note = 2'-deoxy-2'-fluoroadenosine-3'-phosphate
  modified_base 18: mod_base = OTHER; note = 2'-O-methylcytidine-3'-phosphate
  modified_base 19: mod_base = OTHER; note = 2'-O-methylcytidine-3'-phosphate
  modified_base 20: mod_base = OTHER; note = 2'-O-methyladenosine-3'-phosphate
  modified_base 21: mod_base = OTHER; note = 2'-O-methylguanosine-3'-phosphorothioate
  modified_base 22: mod_base = OTHER; note = 2'-O-methyladenosine-3'-phosphorothioate
  modified_base 23: mod_base = OTHER; note = 2'-O-methylguanosine
ttgtaccctaggaaataccagag

SEQ ID NO: 565 - RNA, 23 nt, synthetic construct
  source 1..23: mol_type = other RNA
  modified_base 1: mod_base = OTHER; note = 2'-O-methyluridine-3'-phosphorothioate
  modified_base 2: mod_base = OTHER; note = 2'-deoxy-2'-fluorouridine-3'-phosphorothioate
  modified_base 3: mod_base = OTHER; note = 2'-O-methylguanosine-3'-phosphate
  modified_base 4: mod_base = OTHER; note = 2'-deoxy-2'-fluorouridine-3'-phosphate
  modified_base 5: mod_base = OTHER; note = 2'-O-methyladenosine-3'-phosphate
  modified_base 6: mod_base = OTHER; note = 2'-deoxy-2'-fluorocytidine-3'-phosphate
  modified_base 7: mod_base = OTHER; note = 2'-O-methylcytidine-3'-phosphate
  modified_base 8: mod_base = OTHER; note = 2'-deoxy-2'-fluorocytidine-3'-phosphate
  modified_base 9: mod_base = OTHER; note = 2'-O-methyluridine-3'-phosphate
  modified_base 10: mod_base = OTHER; note = 2'-deoxy-2'-fluoroadenosine-3'-phosphate
  modified_base 11: mod_base = OTHER; note = 2'-O-methylguanosine-3'-phosphate
  modified_base 12: mod_base = OTHER; note = 2'-O-methylguanosine-3'-phosphate
  modified_base 13: mod_base = OTHER; note = 2'-O-methyladenosine-3'-phosphate
  modified_base 14: mod_base = OTHER; note = 2'-deoxy-2'-fluoroadenosine-3'-phosphate
  modified_base 15: mod_base = OTHER; note = 2'-O-methyladenosine-3'-phosphate
  modified_base 16: mod_base = OTHER; note = 2'-deoxy-2'-fluorouridine-3'-phosphate
  modified_base 17: mod_base = OTHER; note = 2'-O-methyladenosine-3'-phosphate
  modified_base 18: mod_base = OTHER; note = 2'-deoxy-2'-fluorocytidine-3'-phosphate
  modified_base 19: mod_base = OTHER; note = 2'-O-methylcytidine-3'-phosphate
  modified_base 20: mod_base = OTHER; note = 2'-deoxy-2'-fluoroadenosine-3'-phosphate
  modified_base 21: mod_base = OTHER; note = 2'-O-methylguanosine-3'-phosphorothioate
  modified_base 22: mod_base = OTHER; note = 2'-O-methyladenosine-3'-phosphorothioate
  modified_base 23: mod_base = OTHER; note = 2'-O-methylguanosine
ttgtaccctaggaaataccagag

SEQ ID NO: 566 - RNA, 23 nt, synthetic construct
  source 1..23: mol_type = other RNA
  modified_base 1: mod_base = OTHER; note = 2'-O-methyluridine-3'-phosphorothioate
  modified_base 2: mod_base = OTHER; note = 2'-deoxy-2'-fluorouridine-3'-phosphorothioate
  modified_base 3: mod_base = OTHER; note = 2'-deoxy-2'-fluoroguanosine-3'-phosphate
  modified_base 4: mod_base = OTHER; note = 2'-O-methyluridine-3'-phosphate
  modified_base 5: mod_base = OTHER; note = 2'-deoxy-2'-fluoroadenosine-3'-phosphate
  modified_base 6: mod_base = OTHER; note = 2'-deoxy-2'-fluorocytidine-3'-phosphate
  modified_base 7: mod_base = OTHER; note = 2'-O-methylcytidine-3'-phosphate
  modified_base 8: mod_base = OTHER; note = 2'-deoxy-2'-fluorocytidine-3'-phosphate
  modified_base 9: mod_base = OTHER; note = 2'-O-methyluridine-3'-phosphate
  modified_base 10: mod_base = OTHER; note = 2'-deoxy-2'-fluoroadenosine-3'-phosphate
  modified_base 11: mod_base = OTHER; note = 2'-O-methylguanosine-3'-phosphate
  modified_base 12: mod_base = OTHER; note = 2'-O-methylguanosine-3'-phosphate
  modified_base 13: mod_base = OTHER; note = 2'-O-methyladenosine-3'-phosphate
  modified_base 14: mod_base = OTHER; note = 2'-deoxy-2'-fluoroadenosine-3'-phosphate
  modified_base 15: mod_base = OTHER; note = 2'-deoxy-2'-fluoroadenosine-3'-phosphate
  modified_base 16: mod_base = OTHER; note = 2'-O-methyluridine-3'-phosphate
  modified_base 17: mod_base = OTHER; note = 2'-deoxy-2'-fluoroadenosine-3'-phosphate
  modified_base 18: mod_base = OTHER; note = 2'-deoxy-2'-fluorocytidine-3'-phosphate
  modified_base 19: mod_base = OTHER; note = 2'-O-methylcytidine-3'-phosphate
  modified_base 20: mod_base = OTHER; note = 2'-deoxy-2'-fluoroadenosine-3'-phosphate
  modified_base 21: mod_base = OTHER; note = 2'-O-methylguanosine-3'-phosphorothioate
  modified_base 22: mod_base = OTHER; note = 2'-O-methyladenosine-3'-phosphorothioate
  modified_base 23: mod_base = OTHER; note = 2'-O-methylguanosine
ttgtaccctaggaaataccagag

SEQ ID NO: 567 - RNA, 23 nt, synthetic construct
  source 1..23: mol_type = other RNA
  modified_base 1: mod_base = OTHER; note = 2'-O-methyluridine-3'-phosphorothioate
  modified_base 2: mod_base = OTHER; note = 2'-deoxy-2'-fluorouridine-3'-phosphorothioate
  modified_base 3: mod_base = OTHER; note = 2'-O-methylguanosine-3'-phosphate
  modified_base 4: mod_base = OTHER; note = 2'-deoxy-2'-fluorouridine-3'-phosphate
  modified_base 5: mod_base = OTHER; note = 2'-O-methyladenosine-3'-phosphate
  modified_base 6: mod_base = OTHER; note = 2'-O-methylcytidine-3'-phosphate
  modified_base 7: mod_base = OTHER; note = 2'-O-methylcytidine-3'-phosphate
  modified_base 8: mod_base = OTHER; note = 2'-deoxy-2'-fluorocytidine-3'-phosphate
  modified_base 9: mod_base = OTHER; note = 2'-O-methyluridine-3'-phosphate
  modified_base 10: mod_base = OTHER; note = 2'-deoxy-2'-fluoroadenosine-3'-phosphate
  modified_base 11: mod_base = OTHER; note = 2'-O-methylguanosine-3'-phosphate
  modified_base 12: mod_base = OTHER; note = 2'-O-methylguanosine-3'-phosphate
  modified_base 13: mod_base = OTHER; note = 2'-O-methyladenosine-3'-phosphate
  modified_base 14: mod_base = OTHER; note = 2'-deoxy-2'-fluoroadenosine-3'-phosphate
  modified_base 15: mod_base = OTHER; note = 2'-O-methyladenosine-3'-phosphate
  modified_base 16: mod_base = OTHER; note = 2'-deoxy-2'-fluorouridine-3'-phosphate
  modified_base 17: mod_base = OTHER; note = 2'-O-methyladenosine-3'-phosphate
  modified_base 18: mod_base = OTHER; note = 2'-deoxy-2'-fluorocytidine-3'-phosphate
  modified_base 19: mod_base = OTHER; note = 2'-O-methylcytidine-3'-phosphate
  modified_base 20: mod_base = OTHER; note = 2'-deoxy-2'-fluoroadenosine-3'-phosphate
  modified_base 21: mod_base = OTHER; note = 2'-O-methylguanosine-3'-phosphorothioate
  modified_base 22: mod_base = OTHER; note = 2'-O-methyladenosine-3'-phosphorothioate
  modified_base 23: mod_base = OTHER; note = 2'-O-methylguanosine
ttgtaccctaggaaataccagag

SEQ ID NO: 568 - RNA, 23 nt, synthetic construct
  source 1..23: mol_type = other RNA
  modified_base 1: mod_base = OTHER; note = 2'-O-methyluridine-3'-phosphorothioate 5'phosphate
  modified_base 2: mod_base = OTHER; note = 2'-deoxy-2'-fluorouridine-3'-phosphorothioate
  modified_base 3: mod_base = OTHER; note = 2'-O-methylguanosine-3'-phosphate
  modified_base 4: mod_base = OTHER; note = 2'-deoxy-2'-fluorouridine-3'-phosphate
  modified_base 5: mod_base = OTHER; note = 2'-O-methyladenosine-3'-phosphate
  modified_base 6: mod_base = OTHER; note = 2'-deoxy-2'-fluorocytidine-3'-phosphate
  modified_base 7: mod_base = OTHER; note = 2'-O-methylcytidine-3'-phosphate
  modified_base 8: mod_base = OTHER; note = 2'-deoxy-2'-fluorocytidine-3'-phosphate
  modified_base 9: mod_base = OTHER; note = 2'-O-methyluridine-3'-phosphate
  modified_base 10: mod_base = OTHER; note = 2'-deoxy-2'-fluoroadenosine-3'-phosphate
  modified_base 11: mod_base = OTHER; note = 2'-O-methylguanosine-3'-phosphate
  modified_base 12: mod_base = OTHER; note = 2'-O-methylguanosine-3'-phosphate
  modified_base 13: mod_base = OTHER; note = 2'-O-methyladenosine-3'-phosphate
  modified_base 14: mod_base = OTHER; note = 2'-deoxy-2'-fluoroadenosine-3'-phosphate
  modified_base 15: mod_base = OTHER; note = 2'-O-methyladenosine-3'-phosphate
  modified_base 16: mod_base = OTHER; note = 2'-deoxy-2'-fluorouridine-3'-phosphate
  modified_base 17: mod_base = OTHER; note = 2'-O-methyladenosine-3'-phosphate
  modified_base 18: mod_base = OTHER; note = 2'-deoxy-2'-fluorocytidine-3'-phosphate
  modified_base 19: mod_base = OTHER; note = 2'-O-methylcytidine-3'-phosphate
  modified_base 20: mod_base = OTHER; note = 2'-deoxy-2'-fluoroadenosine-3'-phosphate
  modified_base 21: mod_base = OTHER; note = 2'-O-methylguanosine-3'-phosphorothioate
  modified_base 22: mod_base = OTHER; note = 2'-O-methyladenosine-3'-phosphorothioate
  modified_base 23: mod_base = OTHER; note = 2'-O-methylguanosine
ttgtaccctaggaaataccagag

SEQ ID NO: 569 - RNA, 23 nt, synthetic construct
  source 1..23: mol_type = other RNA
  modified_base 1: mod_base = OTHER; note = 2'-O-methyluridine-3'-phosphorothioate
  modified_base 2: mod_base = OTHER; note = 2'-deoxy-2'-fluorouridine-3'-phosphorothioate
  modified_base 3: mod_base = OTHER; note = 2'-deoxy-2'-fluoroguanosine-3'-phosphate
  modified_base 4: mod_base = OTHER; note = 2'-O-methyluridine-3'-phosphate
  modified_base 5: mod_base = OTHER; note = 2'-deoxy-2'-fluoroadenosine-3'-phosphate
  modified_base 6: mod_base = OTHER; note = 2'-deoxy-2'-fluorocytidine-3'-phosphate
  modified_base 7: mod_base = OTHER; note = 2'-O-methylcytidine-3'-phosphate
  modified_base 8: mod_base = OTHER; note = 2'-deoxy-2'-fluorocytidine-3'-phosphate
  modified_base 9: mod_base = OTHER; note = 2'-O-methyluridine-3'-phosphate
  modified_base 10: mod_base = OTHER; note = 2'-deoxy-2'-fluoroadenosine-3'-phosphate
  modified_base 11: mod_base = OTHER; note = 2'-O-methylguanosine-3'-phosphate
  modified_base 12: mod_base = OTHER; note = 2'-O-methylguanosine-3'-phosphate
  modified_base 13: mod_base = OTHER; note = 2'-O-methyladenosine-3'-phosphate
  modified_base 14: mod_base = OTHER; note = 2'-deoxy-2'-fluoroadenosine-3'-phosphate
  modified_base 15: mod_base = OTHER; note = 2'-O-methyladenosine-3'-phosphate
  modified_base 16: mod_base = OTHER; note = 2'-deoxy-2'-fluorouridine-3'-phosphate
  modified_base 17: mod_base = OTHER; note = 2'-O-methyladenosine-3'-phosphate
  modified_base 18: mod_base = OTHER; note = 2'-deoxy-2'-fluorocytidine-3'-phosphate
  modified_base 19: mod_base = OTHER; note = 2'-O-methylcytidine-3'-phosphate
  modified_base 20: mod_base = OTHER; note = 2'-deoxy-2'-fluoroadenosine-3'-phosphate
  modified_base 21: mod_base = OTHER; note = 2'-O-methylguanosine-3'-phosphorothioate
  modified_base 22: mod_base = OTHER; note = 2'-O-methyladenosine-3'-phosphorothioate
  modified_base 23: mod_base = OTHER; note = 2'-O-methylguanosine
ttgtaccctaggaaataccagag

SEQ ID NO: 570 - RNA, 23 nt, synthetic construct
  source 1..23: mol_type = other RNA
  modified_base 1: mod_base = OTHER; note = 2'-O-methyluridine-3'-phosphorothioate
  modified_base 2: mod_base = OTHER; note = 2'-deoxy-2'-fluorouridine-3'-phosphorothioate
  modified_base 3: mod_base = OTHER; note = 2'-deoxy-2'-fluoroguanosine-3'-phosphate
  modified_base 4: mod_base = OTHER; note = 2'-O-methyluridine-3'-phosphate
  modified_base 5: mod_base = OTHER; note = 2'-O-methyladenosine-3'-phosphate
  modified_base 6: mod_base = OTHER; note = 2'-deoxy-2'-fluorocytidine-3'-phosphate
  modified_base 7: mod_base = OTHER; note = 2'-O-methylcytidine-3'-phosphate
  modified_base 8: mod_base = OTHER; note = 2'-deoxy-2'-fluorocytidine-3'-phosphate
  modified_base 9: mod_base = OTHER; note = 2'-O-methyluridine-3'-phosphate
  modified_base 10: mod_base = OTHER; note = 2'-deoxy-2'-fluoroadenosine-3'-phosphate
  modified_base 11: mod_base = OTHER; note = 2'-O-methylguanosine-3'-phosphate
  modified_base 12: mod_base = OTHER; note = 2'-O-methylguanosine-3'-phosphate
  modified_base 13: mod_base = OTHER; note = 2'-O-methyladenosine-3'-phosphate
  modified_base 14: mod_base = OTHER; note = 2'-deoxy-2'-fluoroadenosine-3'-phosphate
  modified_base 15: mod_base = OTHER; note = 2'-deoxy-2'-fluoroadenosine-3'-phosphate
  modified_base 16: mod_base = OTHER; note = 2'-O-methyluridine-3'-phosphate
  modified_base 17: mod_base = OTHER; note = 2'-deoxy-2'-fluoroadenosine-3'-phosphate
  modified_base 18: mod_base = OTHER; note = 2'-O-methylcytidine-3'-phosphate
  modified_base 19: mod_base = OTHER; note = 2'-O-methylcytidine-3'-phosphate
  modified_base 20: mod_base = OTHER; note = 2'-deoxy-2'-fluoroadenosine-3'-phosphate
  modified_base 21: mod_base = OTHER; note = 2'-O-methylguanosine-3'-phosphorothioate
  modified_base 22: mod_base = OTHER; note = 2'-O-methyladenosine-3'-phosphorothioate
  modified_base 23: mod_base = OTHER; note = 2'-O-methylguanosine
ttgtaccctaggaaataccagag

SEQ ID NO: 571 - RNA, 23 nt, synthetic construct
  source 1..23: mol_type = other RNA
  modified_base 1: mod_base = OTHER; note = 2'-O-methyluridine-3'-phosphorothioate
  modified_base 2: mod_base = OTHER; note = 2'-deoxy-2'-fluorouridine-3'-phosphorothioate
  modified_base 3: mod_base = OTHER; note = 2'-O-methylguanosine-3'-phosphate
  modified_base 4: mod_base = OTHER; note = 2'-deoxy-2'-fluorouridine-3'-phosphate
  modified_base 5: mod_base = OTHER; note = 2'-O-methyladenosine-3'-phosphate
  modified_base 6: mod_base = OTHER; note = 2'-deoxy-2'-fluorocytidine-3'-phosphate
  modified_base 7: mod_base = OTHER; note = 2'-O-methylcytidine-3'-phosphate
  modified_base 8: mod_base = OTHER; note = 2'-deoxy-2'-fluorocytidine-3'-phosphate
  modified_base 9: mod_base = OTHER; note = 2'-O-methyluridine-3'-phosphate
  modified_base 10: mod_base = OTHER; note = 2'-deoxy-2'-fluoroadenosine-3'-phosphate
  modified_base 11: mod_base = OTHER; note = 2'-O-methylguanosine-3'-phosphate
  modified_base 12: mod_base = OTHER; note = 2'-O-methylguanosine-3'-phosphate
  modified_base 13: mod_base = OTHER; note = 2'-O-methyladenosine-3'-phosphate
  modified_base 14: mod_base = OTHER; note = 2'-deoxy-2'-fluoroadenosine-3'-phosphate
  modified_base 15: mod_base = OTHER; note = 2'-O-methyladenosine-3'-phosphate
  modified_base 16: mod_base = OTHER; note = 2'-deoxy-2'-fluorouridine-3'-phosphate
  modified_base 17: mod_base = OTHER; note = 2'-O-methyladenosine-3'-phosphate
  modified_base 18: mod_base = OTHER; note = 2'-deoxy-2'-fluorocytidine-3'-phosphate
  modified_base 19: mod_base = OTHER; note = 2'-O-methylcytidine-3'-phosphate
  modified_base 20: mod_base = OTHER; note = 2'-deoxy-2'-fluoroadenosine-3'-phosphate
  modified_base 21: mod_base = OTHER; note = 2'-O-methylguanosine-3'-phosphorothioate
  modified_base 22: mod_base = OTHER; note = 2'-O-methyladenosine-3'-phosphorothioate
  modified_base 23: mod_base = OTHER; note = 2'-O-methylguanosine
ttgtaccctaggaaataccagag

SEQ ID NO: 572 - RNA, 23 nt, synthetic construct
  source 1..23: mol_type = other RNA
  modified_base 1: mod_base = OTHER; note = 2'-O-methyluridine-3'-phosphorothioate
  modified_base 2: mod_base = OTHER; note = 2'-deoxy-2'-fluorouridine-3'-phosphorothioate
  modified_base 3: mod_base = OTHER; note = 2'-O-methylguanosine-3'-phosphate
  modified_base 4: mod_base = OTHER; note = 2'-O-methyluridine-3'-phosphate
  modified_base 5: mod_base = OTHER; note = 2'-O-methyladenosine-3'-phosphate
  modified_base 6: mod_base = OTHER; note = 2'-deoxy-2'-fluorocytidine-3'-phosphate
  modified_base 7: mod_base = OTHER; note = 2'-O-methylcytidine-3'-phosphate
  modified_base 8: mod_base = OTHER; note = 2'-deoxy-2'-fluorocytidine-3'-phosphate
  modified_base 9: mod_base = OTHER; note = 2'-O-methyluridine-3'-phosphate
  modified_base 10: mod_base = OTHER; note = 2'-deoxy-2'-fluoroadenosine-3'-phosphate
  modified_base 11: mod_base = OTHER; note = 2'-O-methylguanosine-3'-phosphate
  modified_base 12: mod_base = OTHER; note = 2'-O-methylguanosine-3'-phosphate
  modified_base 13: mod_base = OTHER; note = 2'-O-methyladenosine-3'-phosphate
  modified_base 14: mod_base = OTHER; note = 2'-deoxy-2'-fluoroadenosine-3'-phosphate
  modified_base 15: mod_base = OTHER; note = 2'-O-methyladenosine-3'-phosphate
  modified_base 16: mod_base = OTHER; note = 2'-deoxy-2'-fluorouridine-3'-phosphate
  modified_base 17: mod_base = OTHER; note = 2'-O-methyladenosine-3'-phosphate
  modified_base 18: mod_base = OTHER; note = 2'-O-methylcytidine-3'-phosphate
  modified_base 19: mod_base = OTHER; note = 2'-O-methylcytidine-3'-phosphate
  modified_base 20: mod_base = OTHER; note = 2'-deoxy-2'-fluoroadenosine-3'-phosphate
  modified_base 21: mod_base = OTHER; note = 2'-O-methylguanosine-3'-phosphorothioate
  modified_base 22: mod_base = OTHER; note = 2'-O-methyladenosine-3'-phosphorothioate
  modified_base 23: mod_base = OTHER; note = 2'-O-methylguanosine
ttgtaccctaggaaataccagag

SEQ ID NO: 573 - RNA, 23 nt, synthetic construct
  source 1..23: mol_type = other RNA
  modified_base 1: mod_base = OTHER; note = 2'-O-methyluridine-3'-phosphorothioate
  modified_base 2: mod_base = OTHER; note = 2'-deoxy-2'-fluorouridine-3'-phosphorothioate
  modified_base 3: mod_base = OTHER; note = 2'-O-methylguanosine-3'-phosphate
  modified_base 4: mod_base = OTHER; note = 2'-deoxy-2'-fluorouridine-3'-phosphate
  modified_base 5: mod_base = OTHER; note = 2'-O-methyladenosine-3'-phosphate
  modified_base 6: mod_base = OTHER; note = 2'-deoxy-2'-fluorocytidine-3'-phosphate
  modified_base 7: mod_base = OTHER; note = 2'-O-methylcytidine-3'-phosphate
  modified_base 8: mod_base = OTHER; note = 2'-deoxy-2'-fluorocytidine-3'-phosphate
  modified_base 9: mod_base = OTHER; note = 2'-O-methyluridine-3'-phosphate
  modified_base 10: mod_base = OTHER; note = 2'-deoxy-2'-fluoroadenosine-3'-phosphate
  modified_base 11: mod_base = OTHER; note = 2'-O-methylguanosine-3'-phosphate
  modified_base 12: mod_base = OTHER; note = 2'-O-methylguanosine-3'-phosphate
  modified_base 13: mod_base = OTHER; note = 2'-O-methyladenosine-3'-phosphate
  modified_base 14: mod_base = OTHER; note = 2'-deoxy-2'-fluoroadenosine-3'-phosphate
  modified_base 15: mod_base = OTHER; note = 2'-O-methyladenosine-3'-phosphate
  modified_base 16: mod_base = OTHER; note = 2'-deoxy-2'-fluorouridine-3'-phosphate
  modified_base 17: mod_base = OTHER; note = 2'-O-methyladenosine-3'-phosphate
  modified_base 18: mod_base = OTHER; note = 2'-deoxy-2'-fluorocytidine-3'-phosphate
  modified_base 19: mod_base = OTHER; note = 2'-O-methylcytidine-3'-phosphate
  modified_base 20: mod_base = OTHER; note = 2'-deoxy-2'-fluoroadenosine-3'-phosphate
  modified_base 21: mod_base = OTHER; note = 2'-O-methylguanosine-3'-phosphorothioate
  modified_base 22: mod_base = OTHER; note = 2'-O-methyladenosine-3'-phosphorothioate
  modified_base 23: mod_base = OTHER; note = 2'-O-methylguanosine
ttgtaccctaggaaataccagag

SEQ ID NO: 574 - RNA, 23 nt, synthetic construct
  source 1..23: mol_type = other RNA
  modified_base 1: mod_base = OTHER; note = 2'-O-methyluridine-3'-phosphorothioate
  modified_base 2: mod_base = OTHER; note = 2'-deoxy-2'-fluorouridine-3'-phosphorothioate
  modified_base 3: mod_base = OTHER; note = 2'-O-methylguanosine-3'-phosphate
  modified_base 4: mod_base = OTHER; note = 2'-O-methyluridine-3'-phosphate
  modified_base 5: mod_base = OTHER; note = 2'-O-methyladenosine-3'-phosphate
  modified_base 6: mod_base = OTHER; note = 2'-deoxy-2'-fluorocytidine-3'-phosphate
  modified_base 7: mod_base = OTHER; note = 2'-O-methylcytidine-3'-phosphate
  modified_base 8: mod_base = OTHER; note = 2'-O-methylcytidine-3'-phosphate
  modified_base 9: mod_base = OTHER; note = 2'-deoxy-2'-fluorouridine-3'-phosphate
  modified_base 10: mod_base = OTHER; note = 2'-O-methyladenosine-3'-phosphate
  modified_base 11: mod_base = OTHER; note = 2'-O-methylguanosine-3'-phosphate
  modified_base 12: mod_base = OTHER; note = 2'-O-methylguanosine-3'-phosphate
  modified_base 13: mod_base = OTHER; note = 2'-O-methyladenosine-3'-phosphate
  modified_base 14: mod_base = OTHER; note = 2'-deoxy-2'-fluoroadenosine-3'-phosphate
  modified_base 15: mod_base = OTHER; note = 2'-O-methyladenosine-3'-phosphate
  modified_base 16: mod_base = OTHER; note = 2'-deoxy-2'-fluorouridine-3'-phosphate
  modified_base 17: mod_base = OTHER; note = 2'-O-methyladenosine-3'-phosphate
  modified_base 18: mod_base = OTHER; note = 2'-O-methylcytidine-3'-phosphate
  modified_base 19: mod_base = OTHER; note = 2'-O-methylcytidine-3'-phosphate
  modified_base 20: mod_base = OTHER; note = 2'-O-methyladenosine-3'-phosphate
  modified_base 21: mod_base = OTHER; note = 2'-O-methylguanosine-3'-phosphorothioate
  modified_base 22: mod_base = OTHER; note = 2'-O-methyladenosine-3'-phosphorothioate
  modified_base 23: mod_base = OTHER; note = 2'-O-methylguanosine
ttgtaccctaggaaataccagag

SEQ ID NO: 575 - RNA, 23 nt, synthetic construct
  source 1..23: mol_type = other RNA
  modified_base 1: mod_base = OTHER; note = 2'-O-methyluridine-3'-phosphorothioate
  modified_base 2: mod_base = OTHER; note = 2'-deoxy-2'-fluorouridine-3'-phosphorothioate
  modified_base 3: mod_base = OTHER; note = 2'-deoxy-2'-fluoroguanosine-3'-phosphate
  modified_base 4: mod_base = OTHER; note = 2'-O-methyluridine-3'-phosphate
  modified_base 5: mod_base = OTHER; note = 2'-O-methyladenosine-3'-phosphate
  modified_base 6: mod_base = OTHER; note = 2'-deoxy-2'-fluorocytidine-3'-phosphate
  modified_base 7: mod_base = OTHER; note = 2'-O-methylcytidine-3'-phosphate
  modified_base 8: mod_base = OTHER; note = 2'-deoxy-2'-fluorocytidine-3'-phosphate
  modified_base 9: mod_base = OTHER; note = 2'-O-methyluridine-3'-phosphate
  modified_base 10: mod_base = OTHER; note = 2'-deoxy-2'-fluoroadenosine-3'-phosphate
  modified_base 11: mod_base = OTHER; note = 2'-O-methylguanosine-3'-phosphate
  modified_base 12: mod_base = OTHER; note = 2'-O-methylguanosine-3'-phosphate
  modified_base 13: mod_base = OTHER; note = 2'-O-methyladenosine-3'-phosphate
  modified_base 14: mod_base = OTHER; note = 2'-deoxy-2'-fluoroadenosine-3'-phosphate
  modified_base 15: mod_base = OTHER; note = 2'-deoxy-2'-fluoroadenosine-3'-phosphate
  modified_base 16: mod_base = OTHER; note = 2'-O-methyluridine-3'-phosphate
  modified_base 17: mod_base = OTHER; note = 2'-deoxy-2'-fluoroadenosine-3'-phosphate
  modified_base 18: mod_base = OTHER; note = 2'-deoxy-2'-fluorocytidine-3'-phosphate
  modified_base 19: mod_base = OTHER; note = 2'-O-methylcytidine-3'-phosphate
  modified_base 20: mod_base = OTHER; note = 2'-O-methyladenosine-3'-phosphate
  modified_base 21: mod_base = OTHER; note = 2'-O-methylguanosine-3'-phosphorothioate
  modified_base 22: mod_base = OTHER; note = 2'-O-methyladenosine-3'-phosphorothioate
  modified_base 23: mod_base = OTHER; note = 2'-O-methylguanosine
ttgtaccctaggaaataccagag

SEQ ID NO: 576 - RNA, 23 nt, synthetic construct
  source 1..23: mol_type = other RNA
  modified_base 1: mod_base = OTHER; note = 2'-O-methyluridine-3'-phosphorothioate
  modified_base 2: mod_base = OTHER; note = 2'-deoxy-2'-fluorouridine-3'-phosphorothioate
  modified_base 3: mod_base = OTHER; note = 2'-deoxy-2'-fluoroguanosine-3'-phosphate
  modified_base 4: mod_base = OTHER; note = 2'-O-methyluridine-3'-phosphate
  modified_base 5: mod_base = OTHER; note = 2'-deoxy-2'-fluoroadenosine-3'-phosphate
  modified_base 6: mod_base = OTHER; note = 2'-deoxy-2'-fluorocytidine-3'-phosphate
  modified_base 7: mod_base = OTHER; note = 2'-O-methylcytidine-3'-phosphate
  modified_base 8: mod_base = OTHER; note = 2'-deoxy-2'-fluorocytidine-3'-phosphate
  modified_base 9: mod_base = OTHER; note = 2'-O-methyluridine-3'-phosphate
  modified_base 10: mod_base = OTHER; note = 2'-deoxy-2'-fluoroadenosine-3'-phosphate
  modified_base 11: mod_base = OTHER; note = 2'-O-methylguanosine-3'-phosphate
  modified_base 12: mod_base = OTHER; note = 2'-O-methylguanosine-3'-phosphate
  modified_base 13: mod_base = OTHER; note = 2'-O-methyladenosine-3'-phosphate
  modified_base 14: mod_base = OTHER; note = 2'-deoxy-2'-fluoroadenosine-3'-phosphate
  modified_base 15: mod_base = OTHER; note = 2'-deoxy-2'-fluoroadenosine-3'-phosphate
  modified_base 16: mod_base = OTHER; note = 2'-O-methyluridine-3'-phosphate
  modified_base 17: mod_base = OTHER; note = 2'-deoxy-2'-fluoroadenosine-3'-phosphate
  modified_base 18: mod_base = OTHER; note = 2'-deoxy-2'-fluorocytidine-3'-phosphate
  modified_base 19: mod_base = OTHER; note = 2'-O-methylcytidine-3'-phosphate
  modified_base 20: mod_base = OTHER; note = 2'-O-methyladenosine-3'-phosphate
  modified_base 21: mod_base = OTHER; note = 2'-O-methylguanosine-3'-phosphorothioate
  modified_base 22: mod_base = OTHER; note = 2'-O-methyladenosine-3'-phosphorothioate
  modified_base 23: mod_base = OTHER; note = 2'-O-methylguanosine
ttgtaccctaggaaataccagag

SEQ ID NO: 577 - RNA, 23 nt, synthetic construct
  source 1..23: mol_type = other RNA
  modified_base 1: mod_base = OTHER; note = 2'-O-methyluridine-3'-phosphorothioate
  modified_base 2: mod_base = OTHER; note = 2'-deoxy-2'-fluorouridine-3'-phosphorothioate
  modified_base 3: mod_base = OTHER; note = 2'-O-methylguanosine-3'-phosphate
  modified_base 4: mod_base = OTHER; note = 2'-O-methyluridine-3'-phosphate
  modified_base 5: mod_base = OTHER; note = 2'-O-methyladenosine-3'-phosphate
  modified_base 6: mod_base = OTHER; note = 2'-deoxy-2'-fluorocytidine-3'-phosphate
  modified_base 7: mod_base = OTHER; note = 2'-O-methylcytidine-3'-phosphate
  modified_base 8: mod_base = OTHER; note = 2'-O-methylcytidine-3'-phosphate
  modified_base 9: mod_base = OTHER; note = 2'-O-methyluridine-3'-phosphate
  modified_base 10: mod_base = OTHER; note = 2'-deoxy-2'-fluoroadenosine-3'-phosphate
  modified_base 11: mod_base = OTHER; note = 2'-O-methylguanosine-3'-phosphate
  modified_base 12: mod_base = OTHER; note = 2'-O-methylguanosine-3'-phosphate
  modified_base 13: mod_base = OTHER; note = 2'-O-methyladenosine-3'-phosphate
  modified_base 14: mod_base = OTHER; note = 2'-deoxy-2'-fluoroadenosine-3'-phosphate
  modified_base 15: mod_base = OTHER; note = 2'-O-methyladenosine-3'-phosphate
  modified_base 16: mod_base = OTHER; note = 2'-deoxy-2'-fluorouridine-3'-phosphate
  modified_base 17: mod_base = OTHER; note = 2'-O-methyladenosine-3'-phosphate
  modified_base 18: mod_base = OTHER; note = 2'-O-methylcytidine-3'-phosphate
  modified_base 19: mod_base = OTHER; note = 2'-O-methylcytidine-3'-phosphate
  modified_base 20: mod_base = OTHER; note = 2'-deoxy-2'-fluoroadenosine-3'-phosphate
  modified_base 21: mod_base = OTHER; note = 2'-O-methylguanosine-3'-phosphorothioate
  modified_base 22: mod_base = OTHER; note = 2'-O-methyladenosine-3'-phosphorothioate
  modified_base 23: mod_base = OTHER; note = 2'-O-methylguanosine
ttgtaccctaggaaataccagag

SEQ ID NO: 578 - RNA, 23 nt, synthetic construct
  source 1..23: mol_type = other RNA
  modified_base 1: mod_base = OTHER; note = 2'-O-methyluridine-3'-phosphorothioate
  modified_base 2: mod_base = OTHER; note = 2'-O-methyluridine-3'-phosphorothioate
  modified_base 3: mod_base = OTHER; note = 2'-O-methylguanosine-3'-phosphate
  modified_base 4: mod_base = OTHER; note = 2'-deoxy-2'-fluorouridine-3'-phosphate
  modified_base 5: mod_base = OTHER; note = 2'-O-methyladenosine-3'-phosphate
  modified_base 6: mod_base = OTHER; note = 2'-deoxy-2'-fluorocytidine-3'-phosphate
  modified_base 7: mod_base = OTHER; note = 2'-O-methylcytidine-3'-phosphate
  modified_base 8: mod_base = OTHER; note = 2'-deoxy-2'-fluorocytidine-3'-phosphate
  modified_base 9: mod_base = OTHER; note = 2'-O-methyluridine-3'-phosphate
  modified_base 10: mod_base = OTHER; note = 2'-deoxy-2'-fluoroadenosine-3'-phosphate
  modified_base 11: mod_base = OTHER; note = 2'-O-methylguanosine-3'-phosphate
  modified_base 12: mod_base = OTHER; note = 2'-O-methylguanosine-3'-phosphate
  modified_base 13: mod_base = OTHER; note = 2'-O-methyladenosine-3'-phosphate
  modified_base 14: mod_base = OTHER; note = 2'-deoxy-2'-fluoroadenosine-3'-phosphate
  modified_base 15: mod_base = OTHER; note = 2'-O-methyladenosine-3'-phosphate
  modified_base 16: mod_base = OTHER; note = 2'-deoxy-2'-fluorouridine-3'-phosphate
  modified_base 17: mod_base = OTHER; note = 2'-O-methyladenosine-3'-phosphate
  modified_base 18: mod_base = OTHER; note = 2'-deoxy-2'-fluorocytidine-3'-phosphate
  modified_base 19: mod_base = OTHER; note = 2'-O-methylcytidine-3'-phosphate
  modified_base 20: mod_base = OTHER; note = 2'-deoxy-2'-fluoroadenosine-3'-phosphate
  modified_base 21: mod_base = OTHER; note = 2'-O-methylguanosine-3'-phosphorothioate
  modified_base 22: mod_base = OTHER; note = 2'-O-methyladenosine-3'-phosphorothioate
  modified_base 23: mod_base = OTHER; note = 2'-O-methylguanosine
ttgtaccctaggaaataccagag

SEQ ID NO: 579 - RNA, 23 nt, synthetic construct
  source 1..23: mol_type = other RNA
  modified_base 1: mod_base = OTHER; note = 2'-O-methyluridine-3'-phosphorothioate
  modified_base 2: mod_base = OTHER; note = 2'-deoxy-2'-fluorouridine-3'-phosphorothioate
  modified_base 3: mod_base = OTHER; note = 2'-O-methylguanosine-3'-phosphate
  modified_base 4: mod_base = OTHER; note = 2'-O-methyluridine-3'-phosphate
  modified_base 5: mod_base = OTHER; note = 2'-O-methyladenosine-3'-phosphate
  modified_base 6: mod_base = OTHER; note = 2'-deoxy-2'-fluorocytidine-3'-phosphate
  modified_base 7: mod_base = OTHER; note = 2'-O-methylcytidine-3'-phosphate
  modified_base 8: mod_base = OTHER; note = 2'-O-methylcytidine-3'-phosphate
  modified_base 9: mod_base = OTHER; note = 2'-deoxy-2'-fluorouridine-3'-phosphate
  modified_base 10: mod_base = OTHER; note = 2'-O-methyladenosine-3'-phosphate
  modified_base 11: mod_base = OTHER; note = 2'-O-methylguanosine-3'-phosphate
  modified_base 12: mod_base = OTHER; note = 2'-O-methylguanosine-3'-phosphate
  modified_base 13: mod_base = OTHER; note = 2'-O-methyladenosine-3'-phosphate
  modified_base 14: mod_base = OTHER; note = 2'-deoxy-2'-fluoroadenosine-3'-phosphate
  modified_base 15: mod_base = OTHER; note = 2'-O-methyladenosine-3'-phosphate
  modified_base 16: mod_base = OTHER; note = 2'-deoxy-2'-fluorouridine-3'-phosphate
  modified_base 17: mod_base = OTHER; note = 2'-O-methyladenosine-3'-phosphate
  modified_base 18: mod_base = OTHER; note = 2'-O-methylcytidine-3'-phosphate
  modified_base 19: mod_base = OTHER; note = 2'-O-methylcytidine-3'-phosphate
  modified_base 20: mod_base = OTHER; note = 2'-O-methyladenosine-3'-phosphate
  modified_base 21: mod_base = OTHER; note = 2'-O-methylguanosine-3'-phosphorothioate
  modified_base 22: mod_base = OTHER; note = 2'-O-methyladenosine-3'-phosphorothioate
  modified_base 23: mod_base = OTHER; note = 2'-O-methylguanosine
ttgtaccctaggaaataccagag

SEQ ID NO: 580 - RNA, 23 nt, synthetic construct
  source 1..23: mol_type = other RNA
  modified_base 1: mod_base = OTHER; note = 2'-O-methyluridine-3'-phosphorothioate
  modified_base 2: mod_base = OTHER; note = 2'-deoxy-2'-fluorouridine-3'-phosphorothioate
  modified_base 3: mod_base = OTHER; note = 2'-O-methylguanosine-3'-phosphate
  modified_base 4: mod_base = OTHER; note = 2'-deoxy-2'-fluorouridine-3'-phosphate
  modified_base 5: mod_base = OTHER; note = 2'-O-methyladenosine-3'-phosphate
  modified_base 6: mod_base = OTHER; note = 2'-deoxy-2'-fluorocytidine-3'-phosphate
  modified_base 7: mod_base = OTHER; note = 2'-O-methylcytidine-3'-phosphate
  modified_base 8: mod_base = OTHER; note = 2'-deoxy-2'-fluorocytidine-3'-phosphate
  modified_base 9: mod_base = OTHER; note = 2'-O-methyluridine-3'-phosphate
  modified_base 10: mod_base = OTHER; note = 2'-deoxy-2'-fluoroadenosine-3'-phosphate
  modified_base 11: mod_base = OTHER; note = 2'-O-methylguanosine-3'-phosphate
  modified_base 12: mod_base = OTHER; note = 2'-O-methylguanosine-3'-phosphate
  modified_base 13: mod_base = OTHER; note = 2'-O-methyladenosine-3'-phosphate
  modified_base 14: mod_base = OTHER; note = 2'-deoxy-2'-fluoroadenosine-3'-phosphate
  modified_base 15: mod_base = OTHER; note = 2'-O-methyladenosine-3'-phosphate
  modified_base 16: mod_base = OTHER; note = 2'-deoxy-2'-fluorouridine-3'-phosphate
  modified_base 17: mod_base = OTHER; note = 2'-O-methyladenosine-3'-phosphate
  modified_base 18: mod_base = OTHER; note = 2'-deoxy-2'-fluorocytidine-3'-phosphate
  modified_base 19: mod_base = OTHER; note = 2'-O-methylcytidine-3'-phosphate
  modified_base 20: mod_base = OTHER; note = 2'-deoxy-2'-fluoroadenosine-3'-phosphate
  modified_base 21: mod_base = OTHER; note = 2'-O-methylguanosine-3'-phosphorothioate
  modified_base 22: mod_base = OTHER; note = 2'-O-methyladenosine-3'-phosphorothioate
  modified_base 23: mod_base = OTHER; note = 2'-O-methylguanosine
ttgtaccctaggaaataccagag

SEQ ID NO: 581 - RNA, 23 nt, synthetic construct
  source 1..23: mol_type = other RNA
  modified_base 1: mod_base = OTHER; note = 2'-O-methyluridine-3'-phosphorothioate
  modified_base 2: mod_base = OTHER; note = 2'-deoxy-2'-fluorouridine-3'-phosphorothioate
  modified_base 3: mod_base = OTHER; note = 2'-deoxy-2'-fluoroguanosine-3'-phosphate
  modified_base 4: mod_base = OTHER; note = 2'-O-methyluridine-3'-phosphate
  modified_base 5: mod_base = OTHER; note = 2'-deoxy-2'-fluoroadenosine-3'-phosphate
  modified_base 6: mod_base = OTHER; note = 2'-deoxy-2'-fluorocytidine-3'-phosphate
  modified_base 7: mod_base = OTHER; note = 2'-O-methylcytidine-3'-phosphate
  modified_base 8: mod_base = OTHER; note = 2'-deoxy-2'-fluorocytidine-3'-phosphate
  modified_base 9: mod_base = OTHER; note = 2'-O-methyluridine-3'-phosphate
  modified_base 10: mod_base = OTHER; note = 2'-deoxy-2'-fluoroadenosine-3'-phosphate
  modified_base 11: mod_base = OTHER; note = 2'-O-methylguanosine-3'-phosphate
  modified_base 12: mod_base = OTHER; note = 2'-O-methylguanosine-3'-phosphate
  modified_base 13: mod_base = OTHER; note = 2'-O-methyladenosine-3'-phosphate
  modified_base 14: mod_base = OTHER; note = 2'-deoxy-2'-fluoroadenosine-3'-phosphate
  modified_base 15: mod_base = OTHER; note = 2'-deoxy-2'-fluoroadenosine-3'-phosphate
  modified_base 16: mod_base = OTHER; note = 2'-O-methyluridine-3'-phosphate
  modified_base 17: mod_base = OTHER; note = 2'-deoxy-2'-fluoroadenosine-3'-phosphate
  modified_base 18: mod_base = OTHER; note = 2'-O-methylcytidine-3'-phosphate
  modified_base 19: mod_base = OTHER; note = 2'-O-methylcytidine-3'-phosphate
  modified_base 20: mod_base = OTHER; note = 2'-deoxy-2'-fluoroadenosine-3'-phosphate
  modified_base 21: mod_base = OTHER; note = 2'-O-methylguanosine-3'-phosphorothioate
  modified_base 22: mod_base = OTHER; note = 2'-O-methyladenosine-3'-phosphorothioate
  modified_base 23: mod_base = OTHER; note = 2'-O-methylguanosine
ttgtaccctaggaaataccagag

SEQ ID NO: 582 - RNA, 23 nt, synthetic construct
  source 1..23: mol_type = other RNA
  modified_base 1: mod_base = OTHER; note = 2'-O-methyluridine-3'-phosphorothioate
  modified_base 2: mod_base = OTHER; note = 2'-deoxy-2'-fluorouridine-3'-phosphorothioate
  modified_base 3: mod_base = OTHER; note = 2'-O-methylguanosine-3'-phosphate
  modified_base 4: mod_base = OTHER; note = 2'-O-methyluridine-3'-phosphate
  modified_base 5: mod_base = OTHER; note = 2'-O-methyladenosine-3'-phosphate
  modified_base 6: mod_base = OTHER; note = 2'-deoxy-2'-fluorocytidine-3'-phosphate
  modified_base 7: mod_base = OTHER; note = 2'-O-methylcytidine-3'-phosphate
  modified_base 8: mod_base = OTHER; note = 2'-O-methylcytidine-3'-phosphate
  modified_base 9: mod_base = OTHER; note = 2'-deoxy-2'-fluorouridine-3'-phosphate
  modified_base 10: mod_base = OTHER; note = 2'-O-methyladenosine-3'-phosphate
  modified_base 11: mod_base = OTHER; note = 2'-O-methylguanosine-3'-phosphate
  modified_base 12: mod_base = OTHER; note = 2'-O-methylguanosine-3'-phosphate
  modified_base 13: mod_base = OTHER; note = 2'-O-methyladenosine-3'-phosphate
  modified_base 14: mod_base = OTHER; note = 2'-deoxy-2'-fluoroadenosine-3'-phosphate
  modified_base 15: mod_base = OTHER; note = 2'-O-methyladenosine-3'-phosphate
  modified_base 16: mod_base = OTHER; note = 2'-deoxy-2'-fluorouridine-3'-phosphate
  modified_base 17: mod_base = OTHER; note = 2'-O-methyladenosine-3'-phosphate
  modified_base 18: mod_base = OTHER; note = 2'-O-methylcytidine-3'-phosphate
  modified_base 19: mod_base = OTHER; note = 2'-O-methylcytidine-3'-phosphate
  modified_base 20: mod_base = OTHER; note = 2'-O-methyladenosine-3'-phosphate
  modified_base 21: mod_base = OTHER; note = 2'-O-methylguanosine-3'-phosphorothioate
  modified_base 22: mod_base = OTHER; note = 2'-O-methyladenosine-3'-phosphorothioate
  modified_base 23: mod_base = OTHER; note = 2'-O-methylguanosine
ttgtaccctaggaaataccagag

SEQ ID NO: 583 - RNA, 23 nt, synthetic construct
  source 1..23: mol_type = other RNA
  modified_base 1: mod_base = OTHER; note = 2'-O-methyluridine-3'-phosphorothioate
  modified_base 2: mod_base = OTHER; note = 2'-deoxy-2'-fluorouridine-3'-phosphorothioate
  modified_base 3: mod_base = OTHER; note = 2'-deoxy-2'-fluoroguanosine-3'-phosphate
  modified_base 4: mod_base = OTHER; note = 2'-O-methyluridine-3'-phosphate
  modified_base 5: mod_base = OTHER; note = 2'-deoxy-2'-fluoroadenosine-3'-phosphate
  modified_base 6: mod_base = OTHER; note = 2'-deoxy-2'-fluorocytidine-3'-phosphate
  modified_base 7: mod_base = OTHER; note = 2'-O-methylcytidine-3'-phosphate
  modified_base 8: mod_base = OTHER; note = 2'-deoxy-2'-fluorocytidine-3'-phosphate
  modified_base 9: mod_base = OTHER; note = 2'-O-methyluridine-3'-phosphate
  modified_base 10: mod_base = OTHER; note = 2'-deoxy-2'-fluoroadenosine-3'-phosphate
  modified_base 11: mod_base = OTHER; note = 2'-O-methylguanosine-3'-phosphate
  modified_base 12: mod_base = OTHER; note = 2'-O-methylguanosine-3'-phosphate
  modified_base 13: mod_base = OTHER; note = 2'-O-methyladenosine-3'-phosphate
  modified_base 14: mod_base = OTHER; note = 2'-deoxy-2'-fluoroadenosine-3'-phosphate
  modified_base 15: mod_base = OTHER; note = 2'-deoxy-2'-fluoroadenosine-3'-phosphate
  modified_base 16: mod_base = OTHER; note = 2'-O-methyluridine-3'-phosphate
  modified_base 17: mod_base = OTHER; note = 2'-deoxy-2'-fluoroadenosine-3'-phosphate
  modified_base 18: mod_base = OTHER; note = 2'-O-methylcytidine-3'-phosphate
  modified_base 19: mod_base = OTHER; note = 2'-O-methylcytidine-3'-phosphate
  modified_base 20: mod_base = OTHER; note = 2'-O-methyladenosine-3'-phosphate
  modified_base 21: mod_base = OTHER; note = 2'-O-methylguanosine-3'-phosphorothioate
  modified_base 22: mod_base = OTHER; note = 2'-O-methyladenosine-3'-phosphorothioate
  modified_base 23: mod_base = OTHER; note = 2'-O-methylguanosine
ttgtaccctaggaaataccagag

SEQ ID NO: 584 - RNA, 23 nt, synthetic construct
  source 1..23: mol_type = other RNA
  modified_base 1: mod_base = OTHER; note = 2'-O-methyluridine-3'-phosphorothioate
  modified_base 2: mod_base = OTHER; note = 2'-deoxy-2'-fluorouridine-3'-phosphorothioate
  modified_base 3: mod_base = OTHER; note = 2'-O-methylguanosine-3'-phosphate
  modified_base 4: mod_base = OTHER; note = 2'-deoxy-2'-fluorouridine-3'-phosphate
  modified_base 5: mod_base = OTHER; note = 2'-O-methyladenosine-3'-phosphate
  modified_base 6: mod_base = OTHER; note = 2'-deoxy-2'-fluorocytidine-3'-phosphate
  modified_base 7: mod_base = OTHER; note = 2'-O-methylcytidine-3'-phosphate
  modified_base 8: mod_base = OTHER; note = 2'-deoxy-2'-fluorocytidine-3'-phosphate
  modified_base 9: mod_base = OTHER; note = 2'-O-methyluridine-3'-phosphate
  modified_base 10: mod_base = OTHER; note = 2'-deoxy-2'-fluoroadenosine-3'-phosphate
  modified_base 11: mod_base = OTHER; note = 2'-O-methylguanosine-3'-phosphate
  modified_base 12: mod_base = OTHER; note = 2'-O-methylguanosine-3'-phosphate
  modified_base 13: mod_base = OTHER; note = 2'-O-methyladenosine-3'-phosphate
  modified_base 14: mod_base = OTHER; note = 2'-deoxy-2'-fluoroadenosine-3'-phosphate
  modified_base 15: mod_base = OTHER; note = 2'-O-methyladenosine-3'-phosphate
  modified_base 16: mod_base = OTHER; note = 2'-deoxy-2'-fluorouridine-3'-phosphate
  modified_base 17: mod_base = OTHER; note = 2'-O-methyladenosine-3'-phosphate
  modified_base 18: mod_base = OTHER; note = 2'-deoxy-2'-fluorocytidine-3'-phosphate
  modified_base 19: mod_base = OTHER; note = 2'-O-methylcytidine-3'-phosphate
  modified_base 20: mod_base = OTHER; note = 2'-deoxy-2'-fluoroadenosine-3'-phosphate
  modified_base 21: mod_base = OTHER; note = 2'-O-methylguanosine-3'-phosphorothioate
  modified_base 22: mod_base = OTHER; note = 2'-O-methyladenosine-3'-phosphorothioate
  modified_base 23: mod_base = OTHER; note = 2'-O-methylguanosine
ttgtaccctaggaaataccagag

SEQ ID NO: 585 - RNA, 23 nt, synthetic construct
  source 1..23: mol_type = other RNA
  modified_base 1: mod_base = OTHER; note = 2'-O-methyluridine-3'-phosphorothioate
  modified_base 2: mod_base = OTHER; note = 2'-deoxy-2'-fluorouridine-3'-phosphorothioate
  modified_base 3: mod_base = OTHER; note = 2'-O-methylguanosine-3'-phosphate
  modified_base 4: mod_base = OTHER; note = 2'-deoxy-2'-fluorouridine-3'-phosphate
  modified_base 5: mod_base = OTHER; note = 2'-O-methyladenosine-3'-phosphate
  modified_base 6: mod_base = OTHER; note = 2'-deoxy-2'-fluorocytidine-3'-phosphate
  modified_base 7: mod_base = OTHER; note = 2'-O-methylcytidine-3'-phosphate
  modified_base 8: mod_base = OTHER; note = 2'-deoxy-2'-fluorocytidine-3'-phosphate
  modified_base 9: mod_base = OTHER; note = 2'-O-methyluridine-3'-phosphate
  modified_base 10: mod_base = OTHER; note = 2'-deoxy-2'-fluoroadenosine-3'-phosphate
  modified_base 11: mod_base = OTHER; note = 2'-O-methylguanosine-3'-phosphate
  modified_base 12: mod_base = OTHER; note = 2'-O-methylguanosine-3'-phosphate
  modified_base 13: mod_base = OTHER; note = 2'-O-methyladenosine-3'-phosphate
  modified_base 14: mod_base = OTHER; note = 2'-deoxy-2'-fluoroadenosine-3'-phosphate
  modified_base 15: mod_base = OTHER; note = 2'-O-methyladenosine-3'-phosphate
  modified_base 16: mod_base = OTHER; note = 2'-deoxy-2'-fluorouridine-3'-phosphate
  modified_base 17: mod_base = OTHER; note = 2'-O-methyladenosine-3'-phosphate
  modified_base 18: mod_base = OTHER; note = 2'-deoxy-2'-fluorocytidine-3'-phosphate
  modified_base 19: mod_base = OTHER; note = 2'-O-methylcytidine-3'-phosphate
  modified_base 20: mod_base = OTHER; note = 2'-deoxy-2'-fluoroadenosine-3'-phosphate
  modified_base 21: mod_base = OTHER; note = 2'-O-methylguanosine-3'-phosphorothioate
  modified_base 22: mod_base = OTHER; note = 2'-O-methyladenosine-3'-phosphorothioate
  modified_base 23: mod_base = OTHER; note = 2'-O-methylguanosine
ttgtaccctaggaaataccagag

SEQ ID NO: 586 - RNA, 23 nt, synthetic construct
  source 1..23: mol_type = other RNA
  modified_base 1: mod_base = OTHER; note = 2'-O-methyluridine-3'-phosphorothioate
  modified_base 2: mod_base = OTHER; note = 2'-deoxy-2'-fluorouridine-3'-phosphorothioate
  modified_base 3: mod_base = OTHER; note = 2'-O-methylguanosine-3'-phosphate
  modified_base 4: mod_base = OTHER; note = 2'-deoxy-2'-fluorouridine-3'-phosphate
  modified_base 5: mod_base = OTHER; note = 2'-O-methyladenosine-3'-phosphate
  modified_base 6: mod_base = OTHER; note = 2'-deoxy-2'-fluorocytidine-3'-phosphate
  modified_base 7: mod_base = OTHER; note = 2'-O-methylcytidine-3'-phosphate
  modified_base 8: mod_base = OTHER; note = 2'-deoxy-2'-fluorocytidine-3'-phosphate
  modified_base 9: mod_base = OTHER; note = 2'-O-methyluridine-3'-phosphate
  modified_base 10: mod_base = OTHER; note = 2'-deoxy-2'-fluoroadenosine-3'-phosphate
  modified_base 11: mod_base = OTHER; note = 2'-O-methylguanosine-3'-phosphate
  modified_base 12: mod_base = OTHER; note = 2'-O-methylguanosine-3'-phosphate
  modified_base 13: mod_base = OTHER; note = 2'-O-methyladenosine-3'-phosphate
  modified_base 14: mod_base = OTHER; note = 2'-deoxy-2'-fluoroadenosine-3'-phosphate
  modified_base 15: mod_base = OTHER; note = 2'-O-methyladenosine-3'-phosphate
  modified_base 16: mod_base = OTHER; note = 2'-deoxy-2'-fluorouridine-3'-phosphate
  modified_base 17: mod_base = OTHER; note = 2'-O-methyladenosine-3'-phosphate
  modified_base 18: mod_base = OTHER; note = 2'-deoxy-2'-fluorocytidine-3'-phosphate
  modified_base 19: mod_base = OTHER; note = 2'-O-methylcytidine-3'-phosphate
  modified_base 20: mod_base = OTHER; note = 2'-deoxy-2'-fluoroadenosine-3'-phosphate
  modified_base 21: mod_base = OTHER; note = 2'-O-methylguanosine-3'-phosphorothioate
  modified_base 22: mod_base = OTHER; note = 2'-O-methyladenosine-3'-phosphorothioate
  modified_base 23: mod_base = OTHER; note = 2'-O-methylguanosine
ttgtaccctaggaaataccagag

SEQ ID NO: 587 - RNA, 23 nt, synthetic construct
  source 1..23: mol_type = other RNA
  modified_base 1: mod_base = OTHER; note = 2'-O-methyluridine-3'-phosphorothioate
  modified_base 2: mod_base = OTHER; note = 2'-deoxy-2'-fluorouridine-3'-phosphorothioate
  modified_base 3: mod_base = OTHER; note = 2'-O-methylguanosine-3'-phosphate
  modified_base 4: mod_base = OTHER; note = 2'-O-methyluridine-3'-phosphate
  modified_base 5: mod_base = OTHER; note = 2'-O-methyladenosine-3'-phosphate
  modified_base 6: mod_base = OTHER; note = 2'-deoxy-2'-fluorocytidine-3'-phosphate
  modified_base 7: mod_base = OTHER; note = 2'-O-methylcytidine-3'-phosphate
  modified_base 8: mod_base = OTHER; note = 2'-O-methylcytidine-3'-phosphate
  modified_base 9: mod_base = OTHER; note = 2'-deoxy-2'-fluorouridine-3'-phosphate
  modified_base 10: mod_base = OTHER; note = 2'-O-methyladenosine-3'-phosphate
  modified_base 11: mod_base = OTHER; note = 2'-O-methylguanosine-3'-phosphate
  modified_base 12: mod_base = OTHER; note = 2'-O-methylguanosine-3'-phosphate
  modified_base 13: mod_base = OTHER; note = 2'-O-methyladenosine-3'-phosphate
  modified_base 14: mod_base = OTHER; note = 2'-deoxy-2'-fluoroadenosine-3'-phosphate
  modified_base 15: mod_base = OTHER; note = 2'-O-methyladenosine-3'-phosphate
  modified_base 16: mod_base = OTHER; note = 2'-deoxy-2'-fluorouridine-3'-phosphate
  modified_base 17: mod_base = OTHER; note = 2'-O-methyladenosine-3'-phosphate
  modified_base 18: mod_base = OTHER; note = 2'-O-methylcytidine-3'-phosphate
  modified_base 19: mod_base = OTHER; note = 2'-O-methylcytidine-3'-phosphate
  modified_base 20: mod_base = OTHER; note = 2'-O-methyladenosine-3'-phosphate
  modified_base 21: mod_base = OTHER; note = 2'-O-methylguanosine-3'-phosphorothioate
  modified_base 22: mod_base = OTHER; note = 2'-O-methyladenosine-3'-phosphorothioate
  modified_base 23: mod_base = OTHER; note = 2'-O-methylguanosine
ttgtaccctaggaaataccagag

SEQ ID NO: 588 - RNA, 23 nt, synthetic construct
  source 1..23: mol_type = other RNA
  modified_base 1: mod_base = OTHER; note = 2'-O-methyluridine-3'-phosphorothioate
  modified_base 2: mod_base = OTHER; note = 2'-deoxy-2'-fluorouridine-3'-phosphorothioate
  modified_base 3: mod_base = OTHER; note = 2'-O-methylguanosine-3'-phosphate
  modified_base 4: mod_base = OTHER; note = 2'-deoxy-2'-fluorouridine-3'-phosphate
  modified_base 5: mod_base = OTHER; note = 2'-O-methyladenosine-3'-phosphate
  modified_base 6: mod_base = OTHER; note = 2'-deoxy-2'-fluorocytidine-3'-phosphate
  modified_base 7: mod_base = OTHER; note = 2'-O-methylcytidine-3'-phosphate
  modified_base 8: mod_base = OTHER; note = 2'-deoxy-2'-fluorocytidine-3'-phosphate
  modified_base 9: mod_base = OTHER; note = 2'-O-methyluridine-3'-phosphate
  modified_base 10: mod_base = OTHER; note = 2'-deoxy-2'-fluoroadenosine-3'-phosphate
  modified_base 11: mod_base = OTHER; note = 2'-O-methylguanosine-3'-phosphate
  modified_base 12: mod_base = OTHER; note = 2'-O-methylguanosine-3'-phosphate
  modified_base 13: mod_base = OTHER; note = 2'-O-methyladenosine-3'-phosphate
  modified_base 14: mod_base = OTHER; note = 2'-deoxy-2'-fluoroadenosine-3'-phosphate
  modified_base 15: mod_base = OTHER; note = 2'-O-methyladenosine-3'-phosphate
  modified_base 16: mod_base = OTHER; note = 2'-deoxy-2'-fluorouridine-3'-phosphate
  modified_base 17: mod_base = OTHER; note = 2'-O-methyladenosine-3'-phosphate
  modified_base 18: mod_base = OTHER; note = 2'-deoxy-2'-fluorocytidine-3'-phosphate
  modified_base 19: mod_base = OTHER; note = 2'-O-methylcytidine-3'-phosphate
  modified_base 20: mod_base = OTHER; note = 2'-deoxy-2'-fluoroadenosine-3'-phosphate
  modified_base 21: mod_base = OTHER; note = 2'-O-methylguanosine-3'-phosphorothioate
  modified_base 22: mod_base = OTHER; note = 2'-O-methyladenosine-3'-phosphorothioate
  modified_base 23: mod_base = OTHER; note = 2'-O-methylguanosine
ttgtaccctaggaaataccagag

SEQ ID NO: 589 - RNA, 23 nt, synthetic construct
  source 1..23: mol_type = other RNA
  modified_base 1: mod_base = OTHER; note = 2'-O-methyluridine-3'-phosphorothioate
  modified_base 2: mod_base = OTHER; note = 2'-deoxy-2'-fluorouridine-3'-phosphorothioate
  modified_base 3: mod_base = OTHER; note = 2'-O-methylguanosine-3'-phosphate
  modified_base 4: mod_base = OTHER; note = 2'-deoxy-2'-fluorouridine-3'-phosphate
  modified_base 5: mod_base = OTHER; note = 2'-O-methyladenosine-3'-phosphate
  modified_base 6: mod_base = OTHER; note = 2'-deoxy-2'-fluorocytidine-3'-phosphate
  modified_base 7: mod_base = OTHER; note = 2'-O-methylcytidine-3'-phosphate
  modified_base 8: mod_base = OTHER; note = 2'-deoxy-2'-fluorocytidine-3'-phosphate
  modified_base 9: mod_base = OTHER; note = 2'-O-methyluridine-3'-phosphate
  modified_base 10: mod_base = OTHER; note = 2'-deoxy-2'-fluoroadenosine-3'-phosphate
  modified_base 11: mod_base = OTHER; note = 2'-O-methylguanosine-3'-phosphate
  modified_base 12: mod_base = OTHER; note = 2'-O-methylguanosine-3'-phosphate
  modified_base 13: mod_base = OTHER; note = 2'-O-methyladenosine-3'-phosphate
  modified_base 14: mod_base = OTHER; note = 2'-deoxy-2'-fluoroadenosine-3'-phosphate
  modified_base 15: mod_base = OTHER; note = 2'-O-methyladenosine-3'-phosphate
  modified_base 16: mod_base = OTHER; note = 2'-deoxy-2'-fluorouridine-3'-phosphate
  modified_base 17: mod_base = OTHER; note = 2'-O-methyladenosine-3'-phosphate
  modified_base 18: mod_base = OTHER; note = 2'-deoxy-2'-fluorocytidine-3'-phosphate
  modified_base 19: mod_base = OTHER; note = 2'-O-methylcytidine-3'-phosphate
  modified_base 20: mod_base = OTHER; note = 2'-deoxy-2'-fluoroadenosine-3'-phosphate
  modified_base 21: mod_base = OTHER; note = 2'-O-methylguanosine-3'-phosphorothioate
  modified_base 22: mod_base = OTHER; note = 2'-O-methyladenosine-3'-phosphorothioate
  modified_base 23: mod_base = OTHER; note = 2'-O-methylguanosine
ttgtaccctaggaaataccagag

SEQ ID NO: 590 - RNA, 23 nt, synthetic construct
  source 1..23: mol_type = other RNA
  modified_base 1: mod_base = OTHER; note = 2'-O-methyluridine-3'-phosphorothioate
  modified_base 2: mod_base = OTHER; note = 2'-deoxy-2'-fluorouridine-3'-phosphorothioate
  modified_base 3: mod_base = OTHER; note = 2'-O-methylguanosine-3'-phosphate
  modified_base 4: mod_base = OTHER; note = 2'-deoxy-2'-fluorouridine-3'-phosphate
  modified_base 5: mod_base = OTHER; note = 2'-O-methyladenosine-3'-phosphate
  modified_base 6: mod_base = OTHER; note = 2'-deoxy-2'-fluorocytidine-3'-phosphate
  modified_base 7: mod_base = OTHER; note = 2'-O-methylcytidine-3'-phosphate
  modified_base 8: mod_base = OTHER; note = 2'-deoxy-2'-fluorocytidine-3'-phosphate
  modified_base 9: mod_base = OTHER; note = 2'-O-methyluridine-3'-phosphate
  modified_base 10: mod_base = OTHER; note = 2'-deoxy-2'-fluoroadenosine-3'-phosphate
  modified_base 11: mod_base = OTHER; note = 2'-O-methylguanosine-3'-phosphate
  modified_base 12: mod_base = OTHER; note = 2'-O-methylguanosine-3'-phosphate
  modified_base 13: mod_base = OTHER; note = 2'-O-methyladenosine-3'-phosphate
  modified_base 14: mod_base = OTHER; note = 2'-deoxy-2'-fluoroadenosine-3'-phosphate
  modified_base 15: mod_base = OTHER; note = 2'-O-methyladenosine-3'-phosphate
  modified_base 16: mod_base = OTHER; note = 2'-deoxy-2'-fluorouridine-3'-phosphate
  modified_base 17: mod_base = OTHER; note = 2'-O-methyladenosine-3'-phosphate
  modified_base 18: mod_base = OTHER; note = 2'-deoxy-2'-fluorocytidine-3'-phosphate
  modified_base 19: mod_base = OTHER; note = 2'-O-methylcytidine-3'-phosphate
  modified_base 20: mod_base = OTHER; note = 2'-deoxy-2'-fluoroadenosine-3'-phosphate
  modified_base 21: mod_base = OTHER; note = 2'-O-methylguanosine-3'-phosphorothioate
  modified_base 22: mod_base = OTHER; note = 2'-O-methyladenosine-3'-phosphorothioate
  modified_base 23: mod_base = OTHER; note = 2'-O-methylguanosine
ttgtaccctaggaaataccagag

SEQ ID NO: 591 - RNA, 23 nt, synthetic construct
  source 1..23: mol_type = other RNA
  modified_base 1: mod_base = OTHER; note = 2'-O-methyluridine-3'-phosphorothioate
  modified_base 2: mod_base = OTHER; note = 2'-deoxy-2'-fluorouridine-3'-phosphorothioate
  modified_base 3: mod_base = OTHER; note = 2'-O-methylguanosine-3'-phosphate
  modified_base 4: mod_base = OTHER; note = 2'-deoxy-2'-fluorouridine-3'-phosphate
  modified_base 5: mod_base = OTHER; note = 2'-O-methyladenosine-3'-phosphate
  modified_base 6: mod_base = OTHER; note = 2'-deoxy-2'-fluorocytidine-3'-phosphate
  modified_base 7: mod_base = OTHER; note = 2'-O-methylcytidine-3'-phosphate
  modified_base 8: mod_base = OTHER; note = 2'-deoxy-2'-fluorocytidine-3'-phosphate
  modified_base 9: mod_base = OTHER; note = 2'-O-methyluridine-3'-phosphate
  modified_base 10: mod_base = OTHER; note = 2'-deoxy-2'-fluoroadenosine-3'-phosphate
  modified_base 11: mod_base = OTHER; note = 2'-O-methylguanosine-3'-phosphate
  modified_base 12: mod_base = OTHER; note = 2'-O-methylguanosine-3'-phosphate
  modified_base 13: mod_base = OTHER; note = 2'-O-methyladenosine-3'-phosphate
  modified_base 14: mod_base = OTHER; note = 2'-deoxy-2'-fluoroadenosine-3'-phosphate
  modified_base 15: mod_base = OTHER; note = 2'-O-methyladenosine-3'-phosphate
  modified_base 16: mod_base = OTHER; note = 2'-deoxy-2'-fluorouridine-3'-phosphate
  modified_base 17: mod_base = OTHER; note = 2'-O-methyladenosine-3'-phosphate
  modified_base 18: mod_base = OTHER; note = 2'-deoxy-2'-fluorocytidine-3'-phosphate
  modified_base 19: mod_base = OTHER; note = 2'-O-methylcytidine-3'-phosphate
  modified_base 20: mod_base = OTHER; note = 2'-deoxy-2'-fluoroadenosine-3'-phosphate
  modified_base 21: mod_base = OTHER; note = 2'-O-methylguanosine-3'-phosphorothioate
  modified_base 22: mod_base = OTHER; note = 2'-O-methyladenosine-3'-phosphorothioate
  modified_base 23: mod_base = OTHER; note = 2'-O-methylguanosine
ttgtaccctaggaaataccagag

SEQ ID NO: 592 - RNA, 23 nt, synthetic construct
  source 1..23: mol_type = other RNA
  modified_base 1: mod_base = OTHER; note = 2'-O-methyluridine-3'-phosphorothioate
  modified_base 2: mod_base = OTHER; note = 2'-deoxy-2'-fluorouridine-3'-phosphorothioate
  modified_base 3: mod_base = OTHER; note = 2'-O-methylguanosine-3'-phosphate
  modified_base 4: mod_base = OTHER; note = 2'-O-methyluridine-3'-phosphate
  modified_base 5: mod_base = OTHER; note = 2'-O-methyladenosine-3'-phosphate
  modified_base 6: mod_base = OTHER; note = 2'-deoxy-2'-fluorocytidine-3'-phosphate
  modified_base 7: mod_base = OTHER; note = 2'-O-methylcytidine-3'-phosphate
  modified_base 8: mod_base = OTHER; note = 2'-O-methylcytidine-3'-phosphate
  modified_base 9: mod_base = OTHER; note = 2'-deoxy-2'-fluorouridine-3'-phosphate
  modified_base 10: mod_base = OTHER; note = 2'-O-methyladenosine-3'-phosphate
  modified_base 11: mod_base = OTHER; note = 2'-O-methylguanosine-3'-phosphate
  modified_base 12: mod_base = OTHER; note = 2'-O-methylguanosine-3'-phosphate
  modified_base 13: mod_base = OTHER; note = 2'-O-methyladenosine-3'-phosphate
  modified_base 14: mod_base = OTHER; note = 2'-deoxy-2'-fluoroadenosine-3'-phosphate
  modified_base 15: mod_base = OTHER; note = 2'-O-methyladenosine-3'-phosphate
  modified_base 16: mod_base = OTHER; note = 2'-deoxy-2'-fluorouridine-3'-phosphate
  modified_base 17: mod_base = OTHER; note = 2'-O-methyladenosine-3'-phosphate
  modified_base 18: mod_base = OTHER; note = 2'-O-methylcytidine-3'-phosphate
  modified_base 19: mod_base = OTHER; note = 2'-O-methylcytidine-3'-phosphate
  modified_base 20: mod_base = OTHER; note = 2'-O-methyladenosine-3'-phosphate
  modified_base 21: mod_base = OTHER; note = 2'-O-methylguanosine-3'-phosphorothioate
  modified_base 22: mod_base = OTHER; note = 2'-O-methyladenosine-3'-phosphorothioate
  modified_base 23: mod_base = OTHER; note = 2'-O-methylguanosine
ttgtaccctaggaaataccagag

SEQ ID NO: 593 - RNA, 23 nt, synthetic construct
  source 1..23: mol_type = other RNA
  modified_base 1: mod_base = OTHER; note = 2'-O-methyluridine-3'-phosphorothioate
  modified_base 2: mod_base = OTHER; note = 2'-deoxy-2'-fluorouridine-3'-phosphorothioate
  modified_base 3: mod_base = OTHER; note = 2'-O-methylguanosine-3'-phosphate
  modified_base 4: mod_base = OTHER; note = 2'-deoxy-2'-fluorouridine-3'-phosphate
  modified_base 5: mod_base = OTHER; note = 2'-O-methyladenosine-3'-phosphate
  modified_base 6: mod_base = OTHER; note = 2'-deoxy-2'-fluorocytidine-3'-phosphate
  modified_base 7: mod_base = OTHER; note = 2'-O-methylcytidine-3'-phosphate
  modified_base 8: mod_base = OTHER; note = 2'-deoxy-2'-fluorocytidine-3'-phosphate
  modified_base 9: mod_base = OTHER; note = 2'-O-methyluridine-3'-phosphate
  modified_base 10: mod_base = OTHER; note = 2'-deoxy-2'-fluoroadenosine-3'-phosphate
  modified_base 11: mod_base = OTHER; note = 2'-O-methylguanosine-3'-phosphate
  modified_base 12: mod_base = OTHER; note = 2'-O-methylguanosine-3'-phosphate
  modified_base 13: mod_base = OTHER; note = 2'-O-methyladenosine-3'-phosphate
  modified_base 14: mod_base = OTHER; note = 2'-deoxy-2'-fluoroadenosine-3'-phosphate
  modified_base 15: mod_base = OTHER; note = 2'-O-methyladenosine-3'-phosphate
  modified_base 16: mod_base = OTHER; note = 2'-deoxy-2'-fluorouridine-3'-phosphate
  modified_base 17: mod_base = OTHER; note = 2'-O-methyladenosine-3'-phosphate
  modified_base 18: mod_base = OTHER; note = 2'-deoxy-2'-fluorocytidine-3'-phosphate
  modified_base 19: mod_base = OTHER; note = 2'-O-methylcytidine-3'-phosphate
  modified_base 20: mod_base = OTHER; note = 2'-deoxy-2'-fluoroadenosine-3'-phosphate
  modified_base 21: mod_base = OTHER; note = 2'-O-methylguanosine-3'-phosphorothioate
  modified_base 22: mod_base = OTHER; note = 2'-O-methyladenosine-3'-phosphorothioate
  modified_base 23: mod_base = OTHER; note = 2'-O-methylguanosine
ttgtaccctaggaaataccagag

SEQ ID NO: 594 - RNA, 23 nt, synthetic construct
  source 1..23: mol_type = other RNA
  modified_base 1: mod_base = OTHER; note = 2'-O-methyluridine-3'-phosphorothioate
  modified_base 2: mod_base = OTHER; note = 2'-deoxy-2'-fluorouridine-3'-phosphorothioate
  modified_base 3: mod_base = OTHER; note = 2'-O-methylguanosine-3'-phosphate
  modified_base 4: mod_base = OTHER; note = 2'-O-methyluridine-3'-phosphate
  modified_base 5: mod_base = OTHER; note = 2'-O-methyladenosine-3'-phosphate
  modified_base 6: mod_base = OTHER; note = 2'-deoxy-2'-fluorocytidine-3'-phosphate
  modified_base 7: mod_base = OTHER; note = 2'-O-methylcytidine-3'-phosphate
  modified_base 8: mod_base = OTHER; note = 2'-O-methylcytidine-3'-phosphate
  modified_base 9: mod_base = OTHER; note = 2'-deoxy-2'-fluorouridine-3'-phosphate
  modified_base 10: mod_base = OTHER; note = 2'-O-methyladenosine-3'-phosphate
  modified_base 11: mod_base = OTHER; note = 2'-O-methylguanosine-3'-phosphate
  modified_base 12: mod_base = OTHER; note = 2'-O-methylguanosine-3'-phosphate
  modified_base 13: mod_base = OTHER; note = 2'-O-methyladenosine-3'-phosphate
  modified_base 14: mod_base = OTHER; note = 2'-deoxy-2'-fluoroadenosine-3'-phosphate
  modified_base 15: mod_base = OTHER; note = 2'-O-methyladenosine-3'-phosphate
  modified_base 16: mod_base = OTHER; note = 2'-deoxy-2'-fluorouridine-3'-phosphate
  modified_base 17: mod_base = OTHER; note = 2'-O-methyladenosine-3'-phosphate
  modified_base 18: mod_base = OTHER; note = 2'-O-methylcytidine-3'-phosphate
  modified_base 19: mod_base = OTHER; note = 2'-O-methylcytidine-3'-phosphate
  modified_base 20: mod_base = OTHER; note = 2'-O-methyladenosine-3'-phosphate
  modified_base 21: mod_base = OTHER; note = 2'-O-methylguanosine-3'-phosphorothioate
  modified_base 22: mod_base = OTHER; note = 2'-O-methyladenosine-3'-phosphorothioate
  modified_base 23: mod_base = OTHER; note = 2'-O-methylguanosine
ttgtaccctaggaaataccagag

SEQ ID NO: 595 - RNA, 23 nt, synthetic construct
  source 1..23: mol_type = other RNA
  modified_base 1: mod_base = OTHER; note = 2'-O-methyluridine-3'-phosphorothioate
  modified_base 2: mod_base = OTHER; note = 2'-deoxy-2'-fluorouridine-3'-phosphorothioate
  modified_base 3: mod_base = OTHER; note = 2'-O-methylguanosine-3'-phosphate
  modified_base 4: mod_base = OTHER; note = 2'-O-methyluridine-3'-phosphate
  modified_base 5: mod_base = OTHER; note = 2'-O-methyladenosine-3'-phosphate
  modified_base 6: mod_base = OTHER; note = 2'-deoxy-2'-fluorocytidine-3'-phosphate
  modified_base 7: mod_base = OTHER; note = 2'-O-methylcytidine-3'-phosphate
  modified_base 8: mod_base = OTHER; note = 2'-O-methylcytidine-3'-phosphate
  modified_base 9: mod_base = OTHER; note = 2'-deoxy-2'-fluorouridine-3'-phosphate
  modified_base 10: mod_base = OTHER; note = 2'-O-methyladenosine-3'-phosphate
  modified_base 11: mod_base = OTHER; note = 2'-O-methylguanosine-3'-phosphate
  modified_base 12: mod_base = OTHER; note = 2'-O-methylguanosine-3'-phosphate
  modified_base 13: mod_base = OTHER; note = 2'-O-methyladenosine-3'-phosphate
  modified_base 14: mod_base = OTHER; note = 2'-deoxy-2'-fluoroadenosine-3'-phosphate
  modified_base 15: mod_base = OTHER; note = 2'-O-methyladenosine-3'-phosphate
  modified_base 16: mod_base = OTHER; note = 2'-deoxy-2'-fluorouridine-3'-phosphate
  modified_base 17: mod_base = OTHER; note = 2'-O-methyladenosine-3'-phosphate
  modified_base 18: mod_base = OTHER; note = 2'-O-methylcytidine-3'-phosphate
  modified_base 19: mod_base = OTHER; note = 2'-O-methylcytidine-3'-phosphate
  modified_base 20: mod_base = OTHER; note = 2'-O-methyladenosine-3'-phosphate
  modified_base 21: mod_base = OTHER; note = 2'-O-methylguanosine-3'-phosphorothioate
  modified_base 22: mod_base = OTHER; note = 2'-O-methyladenosine-3'-phosphorothioate
  modified_base 23: mod_base = OTHER; note = 2'-O-methylguanosine
ttgtaccctaggaaataccagag

SEQ ID NO: 596 - RNA, 23 nt, synthetic construct
  source 1..23: mol_type = other RNA
  modified_base 1: mod_base = OTHER; note = 2'-O-methyluridine-3'-phosphorothioate
  modified_base 2: mod_base = OTHER; note = 2'-deoxy-2'-fluorouridine-3'-phosphorothioate
  modified_base 3: mod_base = OTHER; note = 2'-O-methylguanosine-3'-phosphate
  modified_base 4: mod_base = OTHER; note = 2'-deoxy-2'-fluorouridine-3'-phosphate
  modified_base 5: mod_base = OTHER; note = 2'-O-methyladenosine-3'-phosphate
  modified_base 6: mod_base = OTHER; note = 2'-deoxy-2'-fluorocytidine-3'-phosphate
  modified_base 7: mod_base = OTHER; note = 2'-O-methylcytidine-3'-phosphate
  modified_base 8: mod_base = OTHER; note = 2'-deoxy-2'-fluorocytidine-3'-phosphate
  modified_base 9: mod_base = OTHER; note = 2'-O-methyluridine-3'-phosphate
  modified_base 10: mod_base = OTHER; note = 2'-deoxy-2'-fluoroadenosine-3'-phosphate
  modified_base 11: mod_base = OTHER; note = 2'-O-methylguanosine-3'-phosphate
  modified_base 12: mod_base = OTHER; note = 2'-O-methylguanosine-3'-phosphate
  modified_base 13: mod_base = OTHER; note = 2'-O-methyladenosine-3'-phosphate
  modified_base 14: mod_base = OTHER; note = 2'-O-methyladenosine-3'-phosphate
  modified_base 15: mod_base = OTHER; note = 2'-O-methyladenosine-3'-phosphate
  modified_base 16: mod_base = OTHER; note = 2'-deoxy-2'-fluorouridine-3'-phosphate
  modified_base 17: mod_base = OTHER; note = 2'-O-methyladenosine-3'-phosphate
  modified_base 18: mod_base = OTHER; note = 2'-deoxy-2'-fluorocytidine-3'-phosphate
  modified_base 19: mod_base = OTHER; note = 2'-O-methylcytidine-3'-phosphate
  modified_base 20: mod_base = OTHER; note = 2'-deoxy-2'-fluoroadenosine-3'-phosphate
  modified_base 21: mod_base = OTHER; note = 2'-O-methylguanosine-3'-phosphorothioate
  modified_base 22: mod_base = OTHER; note = 2'-O-methyladenosine-3'-phosphorothioate
  modified_base 23: mod_base = OTHER; note = 2'-O-methylguanosine
ttgtaccctaggaaataccagag

SEQ ID NO: 597 - RNA, 23 nt, synthetic construct
  source 1..23: mol_type = other RNA
  modified_base 1: mod_base = OTHER; note = 2'-O-methyluridine-3'-phosphorothioate
  modified_base 2: mod_base = OTHER; note = 2'-deoxy-2'-fluorouridine-3'-phosphorothioate
  modified_base 3: mod_base = OTHER; note = 2'-O-methylguanosine-3'-phosphate
  modified_base 4: mod_base = OTHER; note = 2'-deoxy-2'-fluorouridine-3'-phosphate
  modified_base 5: mod_base = OTHER; note = 2'-O-methyladenosine-3'-phosphate
  modified_base 6: mod_base = OTHER; note = 2'-deoxy-2'-fluorocytidine-3'-phosphate
  modified_base 7: mod_base = OTHER; note = 2'-O-methylcytidine-3'-phosphate
  modified_base 8: mod_base = OTHER; note = 2'-deoxy-2'-fluorocytidine-3'-phosphate
  modified_base 9: mod_base = OTHER; note = 2'-O-methyluridine-3'-phosphate
  modified_base 10: mod_base = OTHER; note = 2'-deoxy-2'-fluoroadenosine-3'-phosphate
  modified_base 11: mod_base = OTHER; note = 2'-O-methylguanosine-3'-phosphate
  modified_base 12: mod_base = OTHER; note = 2'-O-methylguanosine-3'-phosphate
  modified_base 13: mod_base = OTHER; note = 2'-O-methyladenosine-3'-phosphate
  modified_base 14: mod_base = OTHER; note = 2'-deoxy-2'-fluoroadenosine-3'-phosphate
  modified_base 15: mod_base = OTHER; note = 2'-O-methyladenosine-3'-phosphate
  modified_base 16: mod_base = OTHER; note = 2'-deoxy-2'-fluorouridine-3'-phosphate
  modified_base 17: mod_base = OTHER; note = 2'-O-methyladenosine-3'-phosphate
  modified_base 18: mod_base = OTHER; note = 2'-deoxy-2'-fluorocytidine-3'-phosphate
  modified_base 19: mod_base = OTHER; note = 2'-O-methylcytidine-3'-phosphate
  modified_base 20: mod_base = OTHER; note = 2'-deoxy-2'-fluoroadenosine-3'-phosphate
  modified_base 21: mod_base = OTHER; note = 2'-O-methylguanosine-3'-phosphorothioate
  modified_base 22: mod_base = OTHER; note = 2'-O-methyladenosine-3'-phosphorothioate
  modified_base 23: mod_base = OTHER; note = 2'-O-methylguanosine
ttgtaccctaggaaataccagag

SEQ ID NO: 598 - RNA, 23 nt, synthetic construct
  source 1..23: mol_type = other RNA
  modified_base 1: mod_base = OTHER; note = 2'-O-methyluridine-3'-phosphorothioate
  modified_base 2: mod_base = OTHER; note = 2'-deoxy-2'-fluorouridine-3'-phosphorothioate
  modified_base 3: mod_base = OTHER; note = 2'-O-methylguanosine-3'-phosphate
  modified_base 4: mod_base = OTHER; note = 2'-O-methyluridine-3'-phosphate
  modified_base 5: mod_base = OTHER; note = 2'-O-methyladenosine-3'-phosphate
  modified_base 6: mod_base = OTHER; note = 2'-deoxy-2'-fluorocytidine-3'-phosphate
  modified_base 7: mod_base = OTHER; note = 2'-O-methylcytidine-3'-phosphate
  modified_base 8: mod_base = OTHER; note = 2'-O-methylcytidine-3'-phosphate
  modified_base 9: mod_base = OTHER; note = 2'-deoxy-2'-fluorouridine-3'-phosphate
  modified_base 10: mod_base = OTHER; note = 2'-O-methyladenosine-3'-phosphate
  modified_base 11: mod_base = OTHER; note = 2'-O-methylguanosine-3'-phosphate
  modified_base 12: mod_base = OTHER; note = 2'-O-methylguanosine-3'-phosphate
  modified_base 13: mod_base = OTHER; note = 2'-O-methyladenosine-3'-phosphate
  modified_base 14: mod_base = OTHER; note = 2'-deoxy-2'-fluoroadenosine-3'-phosphate
  modified_base 15: mod_base = OTHER; note = 2'-O-methyladenosine-3'-phosphate
  modified_base 16: mod_base = OTHER; note = 2'-deoxy-2'-fluorouridine-3'-phosphate
  modified_base 17: mod_base = OTHER; note = 2'-O-methyladenosine-3'-phosphate
  modified_base 18: mod_base = OTHER; note = 2'-O-methylcytidine-3'-phosphate
  modified_base 19: mod_base = OTHER; note = 2'-O-methylcytidine-3'-phosphate
  modified_base 20: mod_base = OTHER; note = 2'-O-methyladenosine-3'-phosphate
  modified_base 21: mod_base = OTHER; note = 2'-O-methylguanosine-3'-phosphorothioate
  modified_base 22: mod_base = OTHER; note = 2'-O-methyladenosine-3'-phosphorothioate
  modified_base 23: mod_base = OTHER; note = 2'-O-methylguanosine
ttgtaccctaggaaataccagag

SEQ ID NO: 599 - RNA, 23 nt, synthetic construct
  source 1..23: mol_type = other RNA
  modified_base 1: mod_base = OTHER; note = 2'-O-methyluridine-3'-phosphorothioate
  modified_base 2: mod_base = OTHER; note = 2'-deoxy-2'-fluorouridine-3'-phosphorothioate
  modified_base 3: mod_base = OTHER; note = 2'-O-methylguanosine-3'-phosphate
  modified_base 4: mod_base = OTHER; note = 2'-deoxy-2'-fluorouridine-3'-phosphate
  modified_base 5: mod_base = OTHER; note = 2'-O-methyladenosine-3'-phosphate
  modified_base 6: mod_base = OTHER; note = 2'-deoxy-2'-fluorocytidine-3'-phosphate
  modified_base 7: mod_base = OTHER; note = 2'-O-methylcytidine-3'-phosphate
  modified_base 8: mod_base = OTHER; note = 2'-deoxy-2'-fluorocytidine-3'-phosphate
  modified_base 9: mod_base = OTHER; note = 2'-O-methyluridine-3'-phosphate
  modified_base 10: mod_base = OTHER; note = 2'-deoxy-2'-fluoroadenosine-3'-phosphate
  modified_base 11: mod_base = OTHER; note = 2'-O-methylguanosine-3'-phosphate
  modified_base 12: mod_base = OTHER; note = 2'-O-methylguanosine-3'-phosphate
  modified_base 13: mod_base = OTHER; note = 2'-O-methyladenosine-3'-phosphate
  modified_base 14: mod_base = OTHER; note = 2'-deoxy-2'-fluoroadenosine-3'-phosphate
  modified_base 15: mod_base = OTHER; note = 2'-O-methyladenosine-3'-phosphate
  modified_base 16: mod_base = OTHER; note = 2'-deoxy-2'-fluorouridine-3'-phosphate
  modified_base 17: mod_base = OTHER; note = 2'-O-methyladenosine-3'-phosphate
  modified_base 18: mod_base = OTHER; note = 2'-deoxy-2'-fluorocytidine-3'-phosphate
  modified_base 19: mod_base = OTHER; note = 2'-O-methylcytidine-3'-phosphate
  modified_base 20: mod_base = OTHER; note = 2'-deoxy-2'-fluoroadenosine-3'-phosphate
  modified_base 21: mod_base = OTHER; note = 2'-O-methylguanosine-3'-phosphorothioate
  modified_base 22: mod_base = OTHER; note = 2'-O-methyladenosine-3'-phosphorothioate
  modified_base 23: mod_base = OTHER; note = 2'-O-methylguanosine
ttgtaccctaggaaataccagag

SEQ ID NO: 600 - RNA, 23 nt, synthetic construct
  source 1..23: mol_type = other RNA
  modified_base 1: mod_base = OTHER; note = 2'-O-methyluridine-3'-phosphorothioate
  modified_base 2: mod_base = OTHER; note = 2'-deoxy-2'-fluorouridine-3'-phosphorothioate
  modified_base 3: mod_base = OTHER; note = 2'-O-methylguanosine-3'-phosphate
  modified_base 4: mod_base = OTHER; note = 2'-O-methyluridine-3'-phosphate
  modified_base 5: mod_base = OTHER; note = 2'-O-methyladenosine-3'-phosphate
  modified_base 6: mod_base = OTHER; note = 2'-deoxy-2'-fluorocytidine-3'-phosphate
  modified_base 7: mod_base = OTHER; note = 2'-O-methylcytidine-3'-phosphate
  modified_base 8: mod_base = OTHER; note = 2'-O-methylcytidine-3'-phosphate
  modified_base 9: mod_base = OTHER; note = 2'-deoxy-2'-fluorouridine-3'-phosphate
  modified_base 10: mod_base = OTHER; note = 2'-O-methyladenosine-3'-phosphate
  modified_base 11: mod_base = OTHER; note = 2'-O-methylguanosine-3'-phosphate
  modified_base 12: mod_base = OTHER; note = 2'-O-methylguanosine-3'-phosphate
  modified_base 13: mod_base = OTHER; note = 2'-O-methyladenosine-3'-phosphate
  modified_base 14: mod_base = OTHER; note = 2'-deoxy-2'-fluoroadenosine-3'-phosphate
  modified_base 15: mod_base = OTHER; note = 2'-O-methyladenosine-3'-phosphate
  modified_base 16: mod_base = OTHER; note = 2'-deoxy-2'-fluorouridine-3'-phosphate
  modified_base 17: mod_base = OTHER; note = 2'-O-methyladenosine-3'-phosphate
  modified_base 18: mod_base = OTHER; note = 2'-O-methylcytidine-3'-phosphate
  modified_base 19: mod_base = OTHER; note = 2'-O-methylcytidine-3'-phosphate
  modified_base 20: mod_base = OTHER; note = 2'-O-methyladenosine-3'-phosphate
  modified_base 21: mod_base = OTHER; note = 2'-O-methylguanosine-3'-phosphorothioate
  modified_base 22: mod_base = OTHER; note = 2'-O-methyladenosine-3'-phosphorothioate
  modified_base 23: mod_base = OTHER; note = 2'-O-methylguanosine
ttgtaccctaggaaataccagag

SEQ ID NO: 601 - RNA, 21 nt, synthetic construct
  source 1..21: mol_type = other RNA
  modified_base 1: mod_base = OTHER; note = 2'-deoxy-2'-fluorocytidine-3'-phosphorothioate
  modified_base 2: mod_base = OTHER; note = 2'-O-methyluridine-3'-phosphorothioate
  modified_base 3: mod_base = OTHER; note = 2'-deoxy-2'-fluoroguanosine-3'-phosphate
  modified_base 4: mod_base = OTHER; note = 2'-O-methylguanosine-3'-phosphate
  modified_base 5: mod_base = OTHER; note = 2'-deoxy-2'-fluorouridine-3'-phosphate
  modified_base 6: mod_base = OTHER; note = 2'-O-methyladenosine-3'-phosphate
  modified_base 7: mod_base = OTHER; note = 2'-deoxy-2'-fluorouridine-3'-phosphate
  modified_base 8: mod_base = OTHER; note = 2'-O-methyluridine-3'-phosphate
  modified_base 9: mod_base = OTHER; note = 2'-deoxy-2'-fluorouridine-3'-phosphate
  modified_base 10: mod_base = OTHER; note = 2'-deoxy-2'-fluorocytidine-3'-phosphate
  modified_base 11: mod_base = OTHER; note = 2'-deoxy-2'-fluorocytidine-3'-phosphate
  modified_base 12: mod_base = OTHER; note = 2'-O-methyluridine-3'-phosphate
  modified_base 13: mod_base = OTHER; note = 2'-deoxy-2'-fluoroadenosine-3'-phosphate
  modified_base 14: mod_base = OTHER; note = 2'-O-methylguanosine-3'-phosphate
  modified_base 15: mod_base = OTHER; note = 2'-deoxy-2'-fluoroguanosine-3'-phosphate
  modified_base 16: mod_base = OTHER; note = 2'-O-methylguanosine-3'-phosphate
  modified_base 17: mod_base = OTHER; note = 2'-deoxy-2'-fluorouridine-3'-phosphate
  modified_base 18: mod_base = OTHER; note = 2'-O-methyladenosine-3'-phosphate
  modified_base 19: mod_base = OTHER; note = 2'-deoxy-2'-fluorocytidine-3'-phosphate
  modified_base 20: mod_base = OTHER; note = 2'-O-methyladenosine-3'-phosphate
  modified_base 21: mod_base = OTHER; note = 2'-deoxy-2'-fluoroadenosine-3'-phosphate ((2S,4R)-1-[29-[[2-(acetylamino)-2-deoxy-beta-D-galactopyra nosyl]oxy]-14,14-bis[[3-[[3-[[5-[[2-(acetylamino)-2-deoxy-b eta-D-galactopyranosyl]oxy]-1-oxopentyl]amino]propyl]amino] -3-oxopropoxy]methyl]-1,12,19,25-tetraoxo-16-oxa-13,20,24-t riazanonacos-1-yl]-4-hydroxy-2-pyrrolidinyl)methyl ester
ctggtatttcctagggtacaa

SEQ ID NO: 602 - RNA, 21 nt, synthetic construct
  source 1..21: mol_type = other RNA
  modified_base 1: mod_base = OTHER; note = 2'-deoxy-2'-fluorocytidine-3'-phosphorothioate
  modified_base 2: mod_base = OTHER; note = 2'-O-methyluridine-3'-phosphorothioate
  modified_base 3: mod_base = OTHER; note = 2'-deoxy-2'-fluoroguanosine-3'-phosphate
  modified_base 4: mod_base = OTHER; note = 2'-O-methylguanosine-3'-phosphate
  modified_base 5: mod_base = OTHER; note = 2'-deoxy-2'-fluorouridine-3'-phosphate
  modified_base 6: mod_base = OTHER; note = 2'-O-methyladenosine-3'-phosphate
  modified_base 7: mod_base = OTHER; note = 2'-deoxy-2'-fluorouridine-3'-phosphate
  modified_base 8: mod_base = OTHER; note = 2'-O-methyluridine-3'-phosphate
  modified_base 9: mod_base = OTHER; note = 2'-deoxy-2'-fluorouridine-3'-phosphate
  modified_base 10: mod_base = OTHER; note = 2'-deoxy-2'-fluorocytidine-3'-phosphate
  modified_base 11: mod_base = OTHER; note = 2'-deoxy-2'-fluorocytidine-3'-phosphate
  modified_base 12: mod_base = OTHER; note = 2'-O-methyluridine-3'-phosphate
  modified_base 13: mod_base = OTHER; note = 2'-deoxy-2'-fluoroadenosine-3'-phosphate
  modified_base 14: mod_base = OTHER; note = 2'-O-methylguanosine-3'-phosphate
  modified_base 15: mod_base = OTHER; note = 2'-deoxy-2'-fluoroguanosine-3'-phosphate
  modified_base 16: mod_base = OTHER; note = 2'-O-methylguanosine-3'-phosphate
  modified_base 17: mod_base = OTHER; note = 2'-deoxy-2'-fluorouridine-3'-phosphate
  modified_base 18: mod_base = OTHER; note = 2'-O-methyladenosine-3'-phosphate
  modified_base 19: mod_base = OTHER; note = 2'-deoxy-2'-fluorocytidine-3'-phosphate
  modified_base 20: mod_base = OTHER; note = 2'-O-methyladenosine-3'-phosphate
  modified_base 21: mod_base = OTHER; note = 2'-deoxy-2'-fluoroadenosine-3'-phosphate ((2S,4R)-1-[29-[[2-(acetylamino)-2-deoxy-beta-D-galactopyra nosyl]oxy]-14,14-bis[[3-[[3-[[5-[[2-(acetylamino)-2-deoxy-b eta-D-galactopyranosyl]oxy]-1-oxopentyl]amino]propyl]amino] -3-oxopropoxy]methyl]-1,12,19,25-tetraoxo-16-oxa-13,20,24-t riazanonacos-1-yl]-4-hydroxy-2-pyrrolidinyl)methyl ester
ctggtatttcctagggtacaa

SEQ ID NO: 603 - DNA, 21 bp, synthetic construct
  source 1..21: mol_type = other DNA
  modified_base 1: mod_base = OTHER; note = 2'-O-methylcytidine-3'-phosphorothioate
  modified_base 2: mod_base = OTHER; note = 2'-O-methyluridine-3'-phosphorothioate
  modified_base 3: mod_base = OTHER; note = 2'-O-methylguanosine-3'-phosphate
  modified_base 4: mod_base = OTHER; note = 2'-O-methylguanosine-3'-phosphate
  modified_base 5: mod_base = OTHER; note = 2'-O-methyluridine-3'-phosphate
  modified_base 6: mod_base = OTHER; note = 2'-O-methyladenosine-3'-phosphate
  modified_base 7: mod_base = OTHER; note = 2'-deoxy-2'-fluorouridine-3'-phosphate
  modified_base 8: mod_base = OTHER; note = 2'-O-methyluridine-3'-phosphate
  modified_base 9: mod_base = OTHER; note = 2'-deoxy-2'-fluorouridine-3'-phosphate
  modified_base 10: mod_base = OTHER; note = 2'-deoxy-2'-fluorocytidine-3'-phosphate
  modified_base 11: mod_base = OTHER; note = 2'-deoxy-2'-fluorocytidine-3'-phosphate
  modified_base 12: mod_base = OTHER; note = 2'-O-methyluridine-3'-phosphate
  modified_base 13: mod_base = OTHER; note = 2'-O-methyladenosine-3'-phosphate
  modified_base 14: mod_base = OTHER; note = 2'-O-methylguanosine-3'-phosphate
  modified_base 15: mod_base = OTHER; note = 2'-O-methylguanosine-3'-phosphate
  modified_base 16: mod_base = OTHER; note = 2'-deoxy-2'-fluoroguanosine-3'-phosphate
  modified_base 18: mod_base = OTHER; note = 2'-O-methyladenosine-3'-phosphate
  modified_base 19: mod_base = OTHER; note = 2'-O-methylcytidine-3'-phosphate
  modified_base 20: mod_base = OTHER; note = 2'-O-methyladenosine-3'-phosphate
  modified_base 21: mod_base = OTHER; note = 2'-O-methyladenosine-3'-phosphate ((2S,4R)-1-[29-[[2-(acetylamino)-2-deoxy-beta-D-galactopyra nosyl]oxy]-14,14-bis[[3-[[3-[[5-[[2-(acetylamino)-2-deoxy-b eta-D-galactopyranosyl]oxy]-1-oxopentyl]amino]propyl]amino] -3-oxopropoxy]methyl]-1,12,19,25-tetraoxo-16-oxa-13,20,24-t riazanonacos-1-yl]-4-hydroxy-2-pyrrolidinyl)methyl ester
  misc_feature 1..16: note = RNA
  misc_feature 18..21: note = RNA
  misc_feature 17: note = DNA
ctggtatttcctagggtacaa

SEQ ID NO: 604 - RNA, 21 nt, synthetic construct
  source 1..21: mol_type = other RNA
  modified_base 1: mod_base = OTHER; note = 2'-deoxy-2'-fluorocytidine-3'-phosphorothioate
  modified_base 2: mod_base = OTHER; note = 2'-O-methyluridine-3'-phosphorothioate
  modified_base 3: mod_base = OTHER; note = 2'-deoxy-2'-fluoroguanosine-3'-phosphate
  modified_base 4: mod_base = OTHER; note = 2'-O-methylguanosine-3'-phosphate
  modified_base 5: mod_base = OTHER; note = 2'-deoxy-2'-fluorouridine-3'-phosphate
  modified_base 6: mod_base = OTHER; note = 2'-O-methyladenosine-3'-phosphate
  modified_base 7: mod_base = OTHER; note = 2'-deoxy-2'-fluorouridine-3'-phosphate
  modified_base 8: mod_base = OTHER; note = 2'-O-methyluridine-3'-phosphate
  modified_base 9: mod_base = OTHER; note = 2'-deoxy-2'-fluorouridine-3'-phosphate
  modified_base 10: mod_base = OTHER; note = 2'-deoxy-2'-fluorocytidine-3'-phosphate
  modified_base 11: mod_base = OTHER; note = 2'-deoxy-2'-fluorocytidine-3'-phosphate
  modified_base 12: mod_base = OTHER; note = 2'-O-methyluridine-3'-phosphate
  modified_base 13: mod_base = OTHER; note = 2'-deoxy-2'-fluoroadenosine-3'-phosphate
  modified_base 14: mod_base = OTHER; note = 2'-O-methylguanosine-3'-phosphate
  modified_base 15: mod_base = OTHER; note = 2'-deoxy-2'-fluoroguanosine-3'-phosphate
  modified_base 16: mod_base = OTHER; note = 2'-O-methylguanosine-3'-phosphate
  modified_base 17: mod_base = OTHER; note = 2'-deoxy-2'-fluorouridine-3'-phosphate
  modified_base 18: mod_base = OTHER; note = 2'-O-methyladenosine-3'-phosphate
  modified_base 19: mod_base = OTHER; note = 2'-deoxy-2'-fluorocytidine-3'-phosphate
  modified_base 20: mod_base = OTHER; note = 2'-O-methyladenosine-3'-phosphate
  modified_base 21: mod_base = OTHER; note = 2'-deoxy-2'-fluoroadenosine-3'-phosphate ((2S,4R)-1-[29-[[2-(acetylamino)-2-deoxy-beta-D-galactopyra nosyl]oxy]-14,14-bis[[3-[[3-[[5-[[2-(acetylamino)-2-deoxy-b eta-D-galactopyranosyl]oxy]-1-oxopentyl]amino]propyl]amino] -3-oxopropoxy]methyl]-1,12,19,25-tetraoxo-16-oxa-13,20,24-t riazanonacos-1-yl]-4-hydroxy-2-pyrrolidinyl)methyl ester
ctggtatttcctagggtacaa

SEQ ID NO: 605 - RNA, 21 nt, synthetic construct
  source 1..21: mol_type = other RNA
  modified_base 1: mod_base = OTHER; note = 2'-deoxy-2'-fluorocytidine-3'-phosphorothioate
  modified_base 2: mod_base = OTHER; note = 2'-O-methyluridine-3'-phosphorothioate
  modified_base 3: mod_base = OTHER; note = 2'-deoxy-2'-fluoroguanosine-3'-phosphate
  modified_base 4: mod_base = OTHER; note = 2'-O-methylguanosine-3'-phosphate
  modified_base 5: mod_base = OTHER; note = 2'-deoxy-2'-fluorouridine-3'-phosphate
  modified_base 6: mod_base = OTHER; note = 2'-O-methyladenosine-3'-phosphate
  modified_base 7: mod_base = OTHER; note = 2'-deoxy-2'-fluorouridine-3'-phosphate
  modified_base 8: mod_base = OTHER; note = 2'-O-methyluridine-3'-phosphate
  modified_base 9: mod_base = OTHER; note = 2'-deoxy-2'-fluorouridine-3'-phosphate
  modified_base 10: mod_base = OTHER; note = 2'-deoxy-2'-fluorocytidine-3'-phosphate
  modified_base 11: mod_base = OTHER; note = 2'-deoxy-2'-fluorocytidine-3'-phosphate
  modified_base 12: mod_base = OTHER; note = 2'-O-methyluridine-3'-phosphate
  modified_base 13: mod_base = OTHER; note = 2'-deoxy-2'-fluoroadenosine-3'-phosphate
  modified_base 14: mod_base = OTHER; note = 2'-O-methylguanosine-3'-phosphate
  modified_base 15: mod_base = OTHER; note = 2'-deoxy-2'-fluoroguanosine-3'-phosphate
  modified_base 16: mod_base = OTHER; note = 2'-O-methylguanosine-3'-phosphate
  modified_base 17: mod_base = OTHER; note = 2'-deoxy-2'-fluorouridine-3'-phosphate
  modified_base 18: mod_base = OTHER; note = 2'-O-methyladenosine-3'-phosphate
  modified_base 19: mod_base = OTHER; note = 2'-deoxy-2'-fluorocytidine-3'-phosphate
  modified_base 20: mod_base = OTHER; note = 2'-O-methyladenosine-3'-phosphate
  modified_base 21: mod_base = OTHER; note = 2'-deoxy-2'-fluoroadenosine-3'-phosphate ((2S,4R)-1-[29-[[2-(acetylamino)-2-deoxy-beta-D-galactopyra nosyl]oxy]-14,14-bis[[3-[[3-[[5-[[2-(acetylamino)-2-deoxy-b eta-D-galactopyranosyl]oxy]-1-oxopentyl]amino]propyl]amino] -3-oxopropoxy]methyl]-1,12,19,25-tetraoxo-16-oxa-13,20,24-t riazanonacos-1-yl]-4-hydroxy-2-pyrrolidinyl)methyl ester
ctggtatttcctagggtacaa

SEQ ID NO: 606 - RNA, 21 nt, synthetic construct
  source 1..21: mol_type = other RNA
  modified_base 1: mod_base = OTHER; note = 2'-deoxy-2'-fluorocytidine-3'-phosphorothioate
  modified_base 2: mod_base = OTHER; note = 2'-O-methyluridine-3'-phosphorothioate
  modified_base 3: mod_base = OTHER; note = 2'-deoxy-2'-fluoroguanosine-3'-phosphate
  modified_base 4: mod_base = OTHER; note = 2'-O-methylguanosine-3'-phosphate
  modified_base 5: mod_base = OTHER; note = 2'-deoxy-2'-fluorouridine-3'-phosphate
  modified_base 6: mod_base = OTHER; note = 2'-O-methyladenosine-3'-phosphate
  modified_base 7: mod_base = OTHER; note = 2'-deoxy-2'-fluorouridine-3'-phosphate
  modified_base 8: mod_base = OTHER; note = 2'-O-methyluridine-3'-phosphate
  modified_base 9: mod_base = OTHER; note = 2'-deoxy-2'-fluorouridine-3'-phosphate
  modified_base 10: mod_base = OTHER; note = 2'-deoxy-2'-fluorocytidine-3'-phosphate
  modified_base 11: mod_base = OTHER; note = 2'-deoxy-2'-fluorocytidine-3'-phosphate
  modified_base 12: mod_base = OTHER; note = 2'-O-methyluridine-3'-phosphate
  modified_base 13: mod_base = OTHER; note = 2'-deoxy-2'-fluoroadenosine-3'-phosphate
  modified_base 14: mod_base = OTHER; note = 2'-O-methylguanosine-3'-phosphate
  modified_base 15: mod_base = OTHER; note = 2'-deoxy-2'-fluoroguanosine-3'-phosphate
  modified_base 16: mod_base = OTHER; note = 2'-O-methylguanosine-3'-phosphate
  modified_base 17: mod_base = OTHER; note = 2'-deoxy-2'-fluorouridine-3'-phosphate
  modified_base 18: mod_base = OTHER; note = 2'-O-methyladenosine-3'-phosphate
  modified_base 19: mod_base = OTHER; note = 2'-deoxy-2'-fluorocytidine-3'-phosphate
  modified_base 20: mod_base = OTHER; note = 2'-O-methyladenosine-3'-phosphate
  modified_base 21: mod_base = OTHER; note = 2'-deoxy-2'-fluoroadenosine-3'-phosphate ((2S,4R)-1-[29-[[2-(acetylamino)-2-deoxy-beta-D-galactopyra nosyl]oxy]-14,14-bis[[3-[[3-[[5-[[2-(acetylamino)-2-deoxy-b eta-D-galactopyranosyl]oxy]-1-oxopentyl]amino]propyl]amino] -3-oxopropoxy]methyl]-1,12,19,25-tetraoxo-16-oxa-13,20,24-t riazanonacos-1-yl]-4-hydroxy-2-pyrrolidinyl)methyl ester
ctggtatttcctagggtacaa

SEQ ID NO: 607 - RNA, 19 nt, synthetic construct
  source 1..19: mol_type = other RNA
  modified_base 1: mod_base = OTHER; note = 2'-O-methylguanosine-3'-phosphorothioate
  modified_base 2: mod_base = OTHER; note = 2'-O-methylguanosine-3'-phosphorothioate
  modified_base 3: mod_base = OTHER; note = 2'-deoxy-2'-fluorouridine-3'-phosphate
  modified_base 4: mod_base = OTHER; note = 2'-O-methyladenosine-3'-phosphate
  modified_base 5: mod_base = OTHER; note = 2'-deoxy-2'-fluorouridine-3'-phosphate
  modified_base 6: mod_base = OTHER; note = 2'-O-methyluridine-3'-phosphate
  modified_base 7: mod_base = OTHER; note = 2'-deoxy-2'-fluorouridine-3'-phosphate
  modified_base 8: mod_base = OTHER; note = 2'-deoxy-2'-fluorocytidine-3'-phosphate
  modified_base 9: mod_base = OTHER; note = 2'-deoxy-2'-fluorocytidine-3'-phosphate
  modified_base 10: mod_base = OTHER; note = 2'-O-methyluridine-3'-phosphate
  modified_base 11: mod_base = OTHER; note = 2'-deoxy-2'-fluoroadenosine-3'-phosphate
  modified_base 12: mod_base = OTHER; note = 2'-O-methylguanosine-3'-phosphate
  modified_base 13: mod_base = OTHER; note = 2'-deoxy-2'-fluoroguanosine-3'-phosphate
  modified_base 14: mod_base = OTHER; note = 2'-O-methylguanosine-3'-phosphate
  modified_base 15: mod_base = OTHER; note = 2'-deoxy-2'-fluorouridine-3'-phosphate
  modified_base 16: mod_base = OTHER; note = 2'-O-methyladenosine-3'-phosphate
  modified_base 17: mod_base = OTHER; note = 2'-deoxy-2'-fluorocytidine-3'-phosphate
  modified_base 18: mod_base = OTHER; note = 2'-O-methyladenosine-3'-phosphate
  modified_base 19: mod_base = OTHER; note = 2'-deoxy-2'-fluoroadenosine-3'-phosphate ((2S,4R)-1-[29-[[2-(acetylamino)-2-deoxy-beta-D-galactopyra nosyl]oxy]-14,14-bis[[3-[[3-[[5-[[2-(acetylamino)-2-deoxy-b eta-D-galactopyranosyl]oxy]-1-oxopentyl]amino]propyl]amino] -3-oxopropoxy]methyl]-1,12,19,25-tetraoxo-16-oxa-13,20,24-t riazanonacos-1-yl]-4-hydroxy-2-pyrrolidinyl)methyl ester
ggtatttcctagggtacaa

SEQ ID NO: 608 - RNA, 21 nt, synthetic construct
  source 1..21: mol_type = other RNA
  modified_base 1: mod_base = OTHER; note = 2'-deoxy-2'-fluorocytidine-3'-phosphorothioate
  modified_base 2: mod_base = OTHER; note = 2'-O-methyluridine-3'-phosphorothioate
  modified_base 3: mod_base = OTHER; note = 2'-deoxy-2'-fluoroguanosine-3'-phosphate
  modified_base 4: mod_base = OTHER; note = 2'-O-methylguanosine-3'-phosphate
  modified_base 5: mod_base = OTHER; note = 2'-deoxy-2'-fluorouridine-3'-phosphate
  modified_base 6: mod_base = OTHER; note = 2'-O-methyladenosine-3'-phosphate
  modified_base 7: mod_base = OTHER; note = 2'-deoxy-2'-fluorouridine-3'-phosphate
  modified_base 8: mod_base = OTHER; note = 2'-O-methyluridine-3'-phosphate
  modified_base 9: mod_base = OTHER; note = 2'-deoxy-2'-fluorouridine-3'-phosphate
  modified_base 10: mod_base = OTHER; note = 2'-deoxy-2'-fluorocytidine-3'-phosphate
  modified_base 11: mod_base = OTHER; note = 2'-deoxy-2'-fluorocytidine-3'-phosphate
  modified_base 12: mod_base = OTHER; note = 2'-O-methyluridine-3'-phosphate
  modified_base 13: mod_base = OTHER; note = 2'-deoxy-2'-fluoroadenosine-3'-phosphate
  modified_base 14: mod_base = OTHER; note = 2'-O-methylguanosine-3'-phosphate
  modified_base 15: mod_base = OTHER; note = 2'-deoxy-2'-fluoroguanosine-3'-phosphate
  modified_base 16: mod_base = OTHER; note = 2'-O-methylguanosine-3'-phosphate
  modified_base 17: mod_base = OTHER; note = 2'-deoxy-2'-fluorouridine-3'-phosphate
  modified_base 18: mod_base = OTHER; note = 2'-O-methyladenosine-3'-phosphate
  modified_base 19: mod_base = OTHER; note = 2'-deoxy-2'-fluorocytidine-3'-phosphate
  modified_base 20: mod_base = OTHER; note = 2'-O-methyladenosine-3'-phosphate
  modified_base 21: mod_base = OTHER; note = 2'-deoxy-2'-fluoroadenosine-3'-phosphate ((2S,4R)-1-[29-[[2-(acetylamino)-2-deoxy-beta-D-galactopyra nosyl]oxy]-14,14-bis[[3-[[3-[[5-[[2-(acetylamino)-2-deoxy-b eta-D-galactopyranosyl]oxy]-1-oxopentyl]amino]propyl]amino] -3-oxopropoxy]methyl]-1,12,19,25-tetraoxo-16-oxa-13,20,24-t riazanonacos-1-yl]-4-hydroxy-2-pyrrolidinyl)methyl ester
ctggtatttcctagggtacaa

SEQ ID NO: 609 - RNA, 21 nt, synthetic construct
  source 1..21: mol_type = other RNA
  modified_base 1: mod_base = OTHER; note = 2'-deoxy-2'-fluorocytidine-3'-phosphorothioate
  modified_base 2: mod_base = OTHER; note = 2'-O-methyluridine-3'-phosphorothioate
  modified_base 3: mod_base = OTHER; note = 2'-deoxy-2'-fluoroguanosine-3'-phosphate
  modified_base 4: mod_base = OTHER; note = 2'-O-methylguanosine-3'-phosphate
  modified_base 5: mod_base = OTHER; note = 2'-deoxy-2'-fluorouridine-3'-phosphate
  modified_base 6: mod_base = OTHER; note = 2'-O-methyladenosine-3'-phosphate
  modified_base 7: mod_base = OTHER; note = 2'-deoxy-2'-fluorouridine-3'-phosphate
  modified_base 8: mod_base = OTHER; note = 2'-O-methyluridine-3'-phosphate
  modified_base 9: mod_base = OTHER; note = 2'-deoxy-2'-fluorouridine-3'-phosphate
  modified_base 10: mod_base = OTHER; note = 2'-deoxy-2'-fluorocytidine-3'-phosphate
  modified_base 11: mod_base = OTHER; note = 2'-deoxy-2'-fluorocytidine-3'-phosphate
  modified_base 12: mod_base = OTHER; note = 2'-O-methyluridine-3'-phosphate
  modified_base 13: mod_base = OTHER; note = 2'-deoxy-2'-fluoroadenosine-3'-phosphate
  modified_base 14: mod_base = OTHER; note = 2'-O-methylguanosine-3'-phosphate
  modified_base 15: mod_base = OTHER; note = 2'-deoxy-2'-fluoroguanosine-3'-phosphate
  modified_base 16: mod_base = OTHER; note = 2'-O-methylguanosine-3'-phosphate
  modified_base 17: mod_base = OTHER; note = 2'-deoxy-2'-fluorouridine-3'-phosphate
  modified_base 18: mod_base = OTHER; note = 2'-O-methyladenosine-3'-phosphate
  modified_base 19: mod_base = OTHER; note = 2'-deoxy-2'-fluorocytidine-3'-phosphate
  modified_base 20: mod_base = OTHER; note = 2'-O-methyladenosine-3'-phosphate
  modified_base 21: mod_base = OTHER; note = 2'-deoxy-2'-fluoroadenosine-3'-phosphate ((2S,4R)-1-[29-[[2-(acetylamino)-2-deoxy-beta-D-galactopyra nosyl]oxy]-14,14-bis[[3-[[3-[[5-[[2-(acetylamino)-2-deoxy-b eta-D-galactopyranosyl]oxy]-1-oxopentyl]amino]propyl]amino] -3-oxopropoxy]methyl]-1,12,19,25-tetraoxo-16-oxa-13,20,24-t riazanonacos-1-yl]-4-hydroxy-2-pyrrolidinyl)methyl ester
ctggtatttcctagggtacaa

SEQ ID NO: 610 - RNA, 21 nt, synthetic construct
  source 1..21: mol_type = other RNA
  modified_base 1: mod_base = OTHER; note = 2'-O-methylcytidine-3'-phosphorothioate
  modified_base 2: mod_base = OTHER; note = 2'-O-methyluridine-3'-phosphorothioate
  modified_base 3: mod_base = OTHER; note = 2'-O-methylguanosine-3'-phosphate
  modified_base 4: mod_base = OTHER; note = 2'-O-methylguanosine-3'-phosphate
  modified_base 5: mod_base = OTHER; note = 2'-O-methyluridine-3'-phosphate
  modified_base 6: mod_base = OTHER; note = 2'-O-methyladenosine-3'-phosphate
  modified_base 7: mod_base = OTHER; note = 2'-deoxy-2'-fluorouridine-3'-phosphate
  modified_base 8: mod_base = OTHER; note = 2'-O-methyluridine-3'-phosphate
  modified_base 9: mod_base = OTHER; note = 2'-deoxy-2'-fluorouridine-3'-phosphate
  modified_base 10: mod_base = OTHER; note = 2'-deoxy-2'-fluorocytidine-3'-phosphate
  modified_base 11: mod_base = OTHER; note = 2'-deoxy-2'-fluorocytidine-3'-phosphate
  modified_base 12: mod_base = OTHER; note = 2'-O-methyluridine-3'-phosphate
  modified_base 13: mod_base = OTHER; note = 2'-O-methyladenosine-3'-phosphate
  modified_base 14: mod_base = OTHER; note = 2'-O-methylguanosine-3'-phosphate
  modified_base 15: mod_base = OTHER; note = 2'-O-methylguanosine-3'-phosphate
  modified_base 16: mod_base = OTHER; note = 2'-deoxy-2'-fluoroguanosine-3'-phosphate
  modified_base 17: mod_base = OTHER; note = 2'-O-methyluridine-3'-phosphate
  modified_base 18: mod_base = OTHER; note = 2'-O-methyladenosine-3'-phosphate
  modified_base 19: mod_base = OTHER; note = 2'-O-methylcytidine-3'-phosphate
  modified_base 20: mod_base = OTHER; note = 2'-O-methyladenosine-3'-phosphate
  modified_base 21: mod_base = OTHER; note = 2'-O-methyladenosine-3'-phosphate ((2S,4R)-1-[29-[[2-(acetylamino)-2-deoxy-beta-D-galactopyra nosyl]oxy]-14,14-bis[[3-[[3-[[5-[[2-(acetylamino)-2-deoxy-b eta-D-galactopyranosyl]oxy]-1-oxopentyl]amino]propyl]amino] -3-oxopropoxy]methyl]-1,12,19,25-tetraoxo-16-oxa-13,20,24-t riazanonacos-1-yl]-4-hydroxy-2-pyrrolidinyl)methyl ester
ctggtatttcctagggtacaa

SEQ ID NO: 611 - RNA, 21 nt, synthetic construct
  source 1..21: mol_type = other RNA
  modified_base 1: mod_base = OTHER; note = 2'-O-methylcytidine-3'-phosphorothioate
  modified_base 2: mod_base = OTHER; note = 2'-O-methyluridine-3'-phosphorothioate
  modified_base 3: mod_base = OTHER; note = 2'-deoxy-2'-fluoroguanosine-3'-phosphate
  modified_base 4: mod_base = OTHER; note = 2'-O-methylguanosine-3'-phosphate
  modified_base 5: mod_base = OTHER; note = 2'-O-methyluridine-3'-phosphate
  modified_base 6: mod_base = OTHER; note = 2'-O-methyladenosine-3'-phosphate
  modified_base 7: mod_base = OTHER; note = 2'-deoxy-2'-fluorouridine-3'-phosphate
  modified_base 8: mod_base = OTHER; note = 2'-O-methyluridine-3'-phosphate
  modified_base 9: mod_base = OTHER; note = 2'-deoxy-2'-fluorouridine-3'-phosphate
  modified_base 10: mod_base = OTHER; note = 2'-deoxy-2'-fluorocytidine-3'-phosphate
  modified_base 11: mod_base = OTHER; note = 2'-deoxy-2'-fluorocytidine-3'-phosphate
  modified_base 12: mod_base = OTHER; note = 2'-O-methyluridine-3'-phosphate
  modified_base 13: mod_base = OTHER; note = 2'-deoxy-2'-fluoroadenosine-3'-phosphate
  modified_base 14: mod_base = OTHER; note = 2'-O-methylguanosine-3'-phosphate
  modified_base 15: mod_base = OTHER; note = 2'-deoxy-2'-fluoroguanosine-3'-phosphate
  modified_base 16: mod_base = OTHER; note = 2'-O-methylguanosine-3'-phosphate
  modified_base 17: mod_base = OTHER; note = 2'-O-methyluridine-3'-phosphate
  modified_base 18: mod_base = OTHER; note = 2'-deoxy-2'-fluoroadenosine-3'-phosphate
  modified_base 19: mod_base = OTHER; note = 2'-O-methylcytidine-3'-phosphate
  modified_base 20: mod_base = OTHER; note = 2'-O-methyladenosine-3'-phosphate
  modified_base 21: mod_base = OTHER; note = 2'-O-methyladenosine-3'-phosphate ((2S,4R)-1-[29-[[2-(acetylamino)-2-deoxy-beta-D-galactopyra nosyl]oxy]-14,14-bis[[3-[[3-[[5-[[2-(acetylamino)-2-deoxy-b eta-D-galactopyranosyl]oxy]-1-oxopentyl]amino]propyl]amino] -3-oxopropoxy]methyl]-1,12,19,25-tetraoxo-16-oxa-13,20,24-t riazanonacos-1-yl]-4-hydroxy-2-pyrrolidinyl)methyl ester
ctggtatttcctagggtacaa

SEQ ID NO: 612 - DNA, 21 bp, synthetic construct
  source 1..21: mol_type = other DNA
  modified_base 1: mod_base = OTHER; note = 2'-O-methylcytidine-3'-phosphorothioate
  modified_base 2: mod_base = OTHER; note = 2'-O-methyluridine-3'-phosphorothioate
  modified_base 3: mod_base = OTHER; note = 2'-O-methylguanosine-3'-phosphate
  modified_base 4: mod_base = OTHER; note = 2'-O-methylguanosine-3'-phosphate
  modified_base 5: mod_base = OTHER; note = 2'-O-methyluridine-3'-phosphate
  modified_base 6: mod_base = OTHER; note = 2'-O-methyladenosine-3'-phosphate
  modified_base 7: mod_base = OTHER; note = 2'-deoxy-2'-fluorouridine-3'-phosphate
  modified_base 8: mod_base = OTHER; note = 2'-O-methyluridine-3'-phosphate
  modified_base 9: mod_base = OTHER; note = 2'-deoxy-2'-fluorouridine-3'-phosphate
  modified_base 10: mod_base = OTHER; note = 2'-deoxy-2'-fluorocytidine-3'-phosphate
  modified_base 11: mod_base = OTHER; note = 2'-deoxy-2'-fluorocytidine-3'-phosphate
  modified_base 12: mod_base = OTHER; note = 2'-O-methyluridine-3'-phosphate
  modified_base 13: mod_base = OTHER; note = 2'-O-methyladenosine-3'-phosphate
  modified_base 14: mod_base = OTHER; note = 2'-O-methylguanosine-3'-phosphate
  modified_base 15: mod_base = OTHER; note = 2'-O-methylguanosine-3'-phosphate
  modified_base 16: mod_base = OTHER; note = 2'-deoxy-2'-fluoroguanosine-3'-phosphate
  modified_base 17: mod_base = OTHER; note = 2'-O-methyluridine-3'-phosphate
  modified_base 18: mod_base = OTHER; note = 2'-O-methyladenosine-3'-phosphate
  modified_base 20: mod_base = OTHER; note = 2'-O-methyladenosine-3'-phosphate
  modified_base 21: mod_base = OTHER; note = 2'-O-methyladenosine-3'-phosphate ((2S,4R)-1-[29-[[2-(acetylamino)-2-deoxy-beta-D-galactopyra nosyl]oxy]-14,14-bis[[3-[[3-[[5-[[2-(acetylamino)-2-deoxy-b eta-D-galactopyranosyl]oxy]-1-oxopentyl]amino]propyl]amino] -3-oxopropoxy]methyl]-1,12,19,25-tetraoxo-16-oxa-13,20,24-t riazanonacos-1-yl]-4-hydroxy-2-pyrrolidinyl)methyl ester
  misc_feature 1..18: note = RNA
  misc_feature 20..21: note = RNA
  misc_feature 19: note = DNA
ctggtatttcctagggtacaa

SEQ ID NO: 613 - RNA, 21 nt, synthetic construct
  source 1..21: mol_type = other RNA
  modified_base 1: mod_base = OTHER; note = 2'-deoxy-2'-fluorocytidine-3'-phosphorothioate
  modified_base 2: mod_base = OTHER; note = 2'-O-methyluridine-3'-phosphorothioate
  modified_base 3: mod_base = OTHER; note = 2'-deoxy-2'-fluoroguanosine-3'-phosphate
  modified_base 4: mod_base = OTHER; note = 2'-O-methylguanosine-3'-phosphate
  modified_base 5: mod_base = OTHER; note = 2'-deoxy-2'-fluorouridine-3'-phosphate
  modified_base 6: mod_base = OTHER; note = 2'-O-methyladenosine-3'-phosphate
  modified_base 7: mod_base = OTHER; note = 2'-deoxy-2'-fluorouridine-3'-phosphate
  modified_base 8: mod_base = OTHER; note = 2'-O-methyluridine-3'-phosphate
  modified_base 9: mod_base = OTHER; note = 2'-deoxy-2'-fluorouridine-3'-phosphate
  modified_base 10: mod_base = OTHER; note = 2'-deoxy-2'-fluorocytidine-3'-phosphate
  modified_base 11: mod_base = OTHER; note = 2'-deoxy-2'-fluorocytidine-3'-phosphate
  modified_base 12: mod_base = OTHER; note = 2'-O-methyluridine-3'-phosphate
  modified_base 13: mod_base = OTHER; note = 2'-deoxy-2'-fluoroadenosine-3'-phosphate
  modified_base 14: mod_base = OTHER; note = 2'-O-methylguanosine-3'-phosphate
  modified_base 15: mod_base = OTHER; note = 2'-deoxy-2'-fluoroguanosine-3'-phosphate
  modified_base 16: mod_base = OTHER; note = 2'-O-methylguanosine-3'-phosphate
  modified_base 17: mod_base = OTHER; note = 2'-deoxy-2'-fluorouridine-3'-phosphate
  modified_base 18: mod_base = OTHER; note = 2'-O-methyladenosine-3'-phosphate
  modified_base 19: mod_base = OTHER; note = 2'-deoxy-2'-fluorocytidine-3'-phosphate
  modified_base 20: mod_base = OTHER; note = 2'-O-methyladenosine-3'-phosphate
  modified_base 21: mod_base = OTHER; note = 2'-deoxy-2'-fluoroadenosine-3'-phosphate ((2S,4R)-1-[29-[[2-(acetylamino)-2-deoxy-beta-D-galactopyra nosyl]oxy]-14,14-bis[[3-[[3-[[5-[[2-(acetylamino)-2-deoxy-b eta-D-galactopyranosyl]oxy]-1-oxopentyl]amino]propyl]amino] -3-oxopropoxy]methyl]-1,12,19,25-tetraoxo-16-oxa-13,20,24-t riazanonacos-1-yl]-4-hydroxy-2-pyrrolidinyl)methyl ester
ctggtatttcctagggtacaa

SEQ ID NO: 614 - RNA, 21 nt, synthetic construct
  source 1..21: mol_type = other RNA
  modified_base 1: mod_base = OTHER; note = 2'-O-methylcytidine-3'-phosphorothioate
  modified_base 2: mod_base = OTHER; note = 2'-O-methyluridine-3'-phosphorothioate
  modified_base 3: mod_base = OTHER; note = 2'-deoxy-2'-fluoroguanosine-3'-phosphate
  modified_base 4: mod_base = OTHER; note = 2'-O-methylguanosine-3'-phosphate
  modified_base 5: mod_base = OTHER; note = 2'-O-methyluridine-3'-phosphate
  modified_base 6: mod_base = OTHER; note = 2'-O-methyladenosine-3'-phosphate
  modified_base 7: mod_base = OTHER; note = 2'-deoxy-2'-fluorouridine-3'-phosphate
  modified_base 8: mod_base = OTHER; note = 2'-O-methyluridine-3'-phosphate
  modified_base 9: mod_base = OTHER; note = 2'-deoxy-2'-fluorouridine-3'-phosphate
  modified_base 10: mod_base = OTHER; note = 2'-deoxy-2'-fluorocytidine-3'-phosphate
  modified_base 11: mod_base = OTHER; note = 2'-deoxy-2'-fluorocytidine-3'-phosphate
  modified_base 12: mod_base = OTHER; note = 2'-O-methyluridine-3'-phosphate
  modified_base 13: mod_base = OTHER; note = 2'-deoxy-2'-fluoroadenosine-3'-phosphate
  modified_base 14: mod_base = OTHER; note = 2'-O-methylguanosine-3'-phosphate
  modified_base 15: mod_base = OTHER; note = 2'-deoxy-2'-fluoroguanosine-3'-phosphate
  modified_base 16: mod_base = OTHER; note = 2'-O-methylguanosine-3'-phosphate
  modified_base 17: mod_base = OTHER; note = 2'-O-methyluridine-3'-phosphate
  modified_base 18: mod_base = OTHER; note = 2'-deoxy-2'-fluoroadenosine-3'-phosphate
  modified_base 19: mod_base = OTHER; note = 2'-O-methylcytidine-3'-phosphate
  modified_base 20: mod_base = OTHER; note = 2'-O-methyladenosine-3'-phosphate
  modified_base 21: mod_base = OTHER; note = 2'-O-methyladenosine-3'-phosphate ((2S,4R)-1-[29-[[2-(acetylamino)-2-deoxy-beta-D-galactopyra nosyl]oxy]-14,14-bis[[3-[[3-[[5-[[2-(acetylamino)-2-deoxy-b eta-D-galactopyranosyl]oxy]-1-oxopentyl]amino]propyl]amino] -3-oxopropoxy]methyl]-1,12,19,25-tetraoxo-16-oxa-13,20,24-t riazanonacos-1-yl]-4-hydroxy-2-pyrrolidinyl)methyl ester
ctggtatttcctagggtacaa

SEQ ID NO: 615 - RNA, 21 nt, synthetic construct
  source 1..21: mol_type = other RNA
  modified_base 1: mod_base = OTHER; note = 2'-deoxy-2'-fluorocytidine-3'-phosphorothioate
  modified_base 2: mod_base = OTHER; note = 2'-O-methyluridine-3'-phosphorothioate
  modified_base 3: mod_base = OTHER; note = 2'-deoxy-2'-fluoroguanosine-3'-phosphate
  modified_base 4: mod_base = OTHER; note = 2'-O-methylguanosine-3'-phosphate
  modified_base 5: mod_base = OTHER; note = 2'-deoxy-2'-fluorouridine-3'-phosphate
  modified_base 6: mod_base = OTHER; note = 2'-O-methyladenosine-3'-phosphate
  modified_base 7: mod_base = OTHER; note = 2'-deoxy-2'-fluorouridine-3'-phosphate
  modified_base 8: mod_base = OTHER; note = 2'-O-methyluridine-3'-phosphate
  modified_base 9: mod_base = OTHER; note = 2'-deoxy-2'-fluorouridine-3'-phosphate
  modified_base 10: mod_base = OTHER; note = 2'-deoxy-2'-fluorocytidine-3'-phosphate
  modified_base 11: mod_base = OTHER; note = 2'-deoxy-2'-fluorocytidine-3'-phosphate
  modified_base 12: mod_base = OTHER; note = 2'-O-methyluridine-3'-phosphate
  modified_base 13: mod_base = OTHER; note = 2'-deoxy-2'-fluoroadenosine-3'-phosphate
  modified_base 14: mod_base = OTHER; note = 2'-O-methylguanosine-3'-phosphate
  modified_base 15: mod_base = OTHER; note = 2'-deoxy-2'-fluoroguanosine-3'-phosphate
  modified_base 16: mod_base = OTHER; note = 2'-O-methylguanosine-3'-phosphate
  modified_base 17: mod_base = OTHER; note = 2'-deoxy-2'-fluorouridine-3'-phosphate
  modified_base 18: mod_base = OTHER; note = 2'-O-methyladenosine-3'-phosphate
  modified_base 19: mod_base = OTHER; note = 2'-deoxy-2'-fluorocytidine-3'-phosphate
  modified_base 20: mod_base = OTHER; note = 2'-O-methyladenosine-3'-phosphate
  modified_base 21: mod_base = OTHER; note = 2'-deoxy-2'-fluoroadenosine-3'-phosphate ((2S,4R)-1-[29-[[2-(acetylamino)-2-deoxy-beta-D-galactopyra nosyl]oxy]-14,14-bis[[3-[[3-[[5-[[2-(acetylamino)-2-deoxy-b eta-D-galactopyranosyl]oxy]-1-oxopentyl]amino]propyl]amino] -3-oxopropoxy]methyl]-1,12,19,25-tetraoxo-16-oxa-13,20,24-t riazanonacos-1-yl]-4-hydroxy-2-pyrrolidinyl)methyl ester
ctggtatttcctagggtacaa

SEQ ID NO: 616 - RNA, 21 nt, synthetic construct
  source 1..21: mol_type = other RNA
  modified_base 1: mod_base = OTHER; note = 2'-deoxy-2'-fluorocytidine-3'-phosphorothioate
  modified_base 2: mod_base = OTHER; note = 2'-O-methyluridine-3'-phosphorothioate
  modified_base 3: mod_base = OTHER; note = 2'-deoxy-2'-fluoroguanosine-3'-phosphate
  modified_base 4: mod_base = OTHER; note = 2'-O-methylguanosine-3'-phosphate
  modified_base 5: mod_base = OTHER; note = 2'-deoxy-2'-fluorouridine-3'-phosphate
  modified_base 6: mod_base = OTHER; note = 2'-O-methyladenosine-3'-phosphate
  modified_base 7: mod_base = OTHER; note = 2'-deoxy-2'-fluorouridine-3'-phosphate
  modified_base 8: mod_base = OTHER; note = 2'-O-methyluridine-3'-phosphate
  modified_base 9: mod_base = OTHER; note = 2'-deoxy-2'-fluorouridine-3'-phosphate
  modified_base 10: mod_base = OTHER; note = 2'-deoxy-2'-fluorocytidine-3'-phosphate
  modified_base 11: mod_base = OTHER; note = 2'-deoxy-2'-fluorocytidine-3'-phosphate
  modified_base 12: mod_base = OTHER; note = 2'-O-methyluridine-3'-phosphate
  modified_base 13: mod_base = OTHER; note = 2'-deoxy-2'-fluoroadenosine-3'-phosphate
  modified_base 14: mod_base = OTHER; note = 2'-O-methylguanosine-3'-phosphate
  modified_base 15: mod_base = OTHER; note = 2'-deoxy-2'-fluoroguanosine-3'-phosphate
  modified_base 16: mod_base = OTHER; note = 2'-O-methylguanosine-3'-phosphate
  modified_base 17: mod_base = OTHER; note = 2'-deoxy-2'-fluorouridine-3'-phosphate
  modified_base 18: mod_base = OTHER; note = 2'-O-methyladenosine-3'-phosphate
  modified_base 19: mod_base = OTHER; note = 2'-deoxy-2'-fluorocytidine-3'-phosphate
  modified_base 20: mod_base = OTHER; note = 2'-O-methyladenosine-3'-phosphate
  modified_base 21: mod_base = OTHER; note = 2'-deoxy-2'-fluoroadenosine-3'-phosphate ((2S,4R)-1-[29-[[2-(acetylamino)-2-deoxy-beta-D-galactopyra nosyl]oxy]-14,14-bis[[3-[[3-[[5-[[2-(acetylamino)-2-deoxy-b eta-D-galactopyranosyl]oxy]-1-oxopentyl]amino]propyl]amino] -3-oxopropoxy]methyl]-1,12,19,25-tetraoxo-16-oxa-13,20,24-t riazanonacos-1-yl]-4-hydroxy-2-pyrrolidinyl)methyl ester
ctggtatttcctagggtacaa

SEQ ID NO: 617 - RNA, 21 nt, synthetic construct
  source 1..21: mol_type = other RNA
  modified_base 1: mod_base = OTHER; note = 2'-deoxy-2'-fluorocytidine-3'-phosphorothioate
  modified_base 2: mod_base = OTHER; note = 2'-O-methyluridine-3'-phosphorothioate
  modified_base 3: mod_base = OTHER; note = 2'-deoxy-2'-fluoroguanosine-3'-phosphate
  modified_base 4: mod_base = OTHER; note = 2'-O-methylguanosine-3'-phosphate
  modified_base 5: mod_base = OTHER; note = 2'-deoxy-2'-fluorouridine-3'-phosphate
  modified_base 6: mod_base = OTHER; note = 2'-O-methyladenosine-3'-phosphate
  modified_base 7: mod_base = OTHER; note = 2'-deoxy-2'-fluorouridine-3'-phosphate
  modified_base 8: mod_base = OTHER; note = 2'-O-methyluridine-3'-phosphate
  modified_base 9: mod_base = OTHER; note = 2'-deoxy-2'-fluorouridine-3'-phosphate
  modified_base 10: mod_base = OTHER; note = 2'-deoxy-2'-fluorocytidine-3'-phosphate
  modified_base 11: mod_base = OTHER; note = 2'-deoxy-2'-fluorocytidine-3'-phosphate
  modified_base 12: mod_base = OTHER; note = 2'-O-methyluridine-3'-phosphate
  modified_base 13: mod_base = OTHER; note = 2'-deoxy-2'-fluoroadenosine-3'-phosphate
  modified_base 14: mod_base = OTHER; note = 2'-O-methylguanosine-3'-phosphate
  modified_base 15: mod_base = OTHER; note = 2'-deoxy-2'-fluoroguanosine-3'-phosphate
  modified_base 16: mod_base = OTHER; note = 2'-O-methylguanosine-3'-phosphate
  modified_base 17: mod_base = OTHER; note = 2'-deoxy-2'-fluorouridine-3'-phosphate
  modified_base 18: mod_base = OTHER; note = 2'-O-methyladenosine-3'-phosphate
  modified_base 19: mod_base = OTHER; note = 2'-deoxy-2'-fluorocytidine-3'-phosphate
  modified_base 20: mod_base = OTHER; note = 2'-O-methyladenosine-3'-phosphate
  modified_base 21: mod_base = OTHER; note = 2'-deoxy-2'-fluoroadenosine-3'-phosphate ((2S,4R)-1-[29-[[2-(acetylamino)-2-deoxy-beta-D-galactopyra nosyl]oxy]-14,14-bis[[3-[[3-[[5-[[2-(acetylamino)-2-deoxy-b eta-D-galactopyranosyl]oxy]-1-oxopentyl]amino]propyl]amino] -3-oxopropoxy]methyl]-1,12,19,25-tetraoxo-16-oxa-13,20,24-t riazanonacos-1-yl]-4-hydroxy-2-pyrrolidinyl)methyl ester
ctggtatttcctagggtacaa

SEQ ID NO: 618 - RNA, 21 nt, synthetic construct
  source 1..21: mol_type = other RNA
  modified_base 1: mod_base = OTHER; note = 2'-O-methylcytidine-3'-phosphorothioate
  modified_base 2: mod_base = OTHER; note = 2'-O-methyluridine-3'-phosphorothioate
  modified_base 3: mod_base = OTHER; note = 2'-deoxy-2'-fluoroguanosine-3'-phosphate
  modified_base 4: mod_base = OTHER; note = 2'-O-methylguanosine-3'-phosphate
  modified_base 5: mod_base = OTHER; note = 2'-O-methyluridine-3'-phosphate
  modified_base 6: mod_base = OTHER; note = 2'-O-methyladenosine-3'-phosphate
  modified_base 7: mod_base = OTHER; note = 2'-deoxy-2'-fluorouridine-3'-phosphate
  modified_base 8: mod_base = OTHER; note = 2'-O-methyluridine-3'-phosphate
  modified_base 9: mod_base = OTHER; note = 2'-deoxy-2'-fluorouridine-3'-phosphate
  modified_base 10: mod_base = OTHER; note = 2'-deoxy-2'-fluorocytidine-3'-phosphate
  modified_base 11: mod_base = OTHER; note = 2'-deoxy-2'-fluorocytidine-3'-phosphate
  modified_base 12: mod_base = OTHER; note = 2'-O-methyluridine-3'-phosphate
  modified_base 13: mod_base = OTHER; note = 2'-deoxy-2'-fluoroadenosine-3'-phosphate
  modified_base 14: mod_base = OTHER; note = 2'-O-methylguanosine-3'-phosphate
  modified_base 15: mod_base = OTHER; note = 2'-deoxy-2'-fluoroguanosine-3'-phosphate
  modified_base 16: mod_base = OTHER; note = 2'-O-methylguanosine-3'-phosphate
  modified_base 17: mod_base = OTHER; note = 2'-O-methyluridine-3'-phosphate
  modified_base 18: mod_base = OTHER; note = 2'-deoxy-2'-fluoroadenosine-3'-phosphate
  modified_base 19: mod_base = OTHER; note = 2'-O-methylcytidine-3'-phosphate
  modified_base 20: mod_base = OTHER; note = 2'-O-methyladenosine-3'-phosphate
  modified_base 21: mod_base = OTHER; note = 2'-O-methyladenosine-3'-phosphate ((2S,4R)-1-[29-[[2-(acetylamino)-2-deoxy-beta-D-galactopyra nosyl]oxy]-14,14-bis[[3-[[3-[[5-[[2-(acetylamino)-2-deoxy-b eta-D-galactopyranosyl]oxy]-1-oxopentyl]amino]propyl]amino] -3-oxopropoxy]methyl]-1,12,19,25-tetraoxo-16-oxa-13,20,24-t riazanonacos-1-yl]-4-hydroxy-2-pyrrolidinyl)methyl ester
ctggtatttcctagggtacaa

SEQ ID NO: 619 - RNA, 21 nt, synthetic construct
  source 1..21: mol_type = other RNA
  modified_base 1: mod_base = OTHER; note = 2'-O-methylcytidine-3'-phosphorothioate
  modified_base 2: mod_base = OTHER; note = 2'-O-methyluridine-3'-phosphorothioate
  modified_base 3: mod_base = OTHER; note = 2'-O-methylguanosine-3'-phosphate
  modified_base 4: mod_base = OTHER; note = 2'-O-methylguanosine-3'-phosphate
  modified_base 5: mod_base = OTHER; note = 2'-O-methyluridine-3'-phosphate
  modified_base 6: mod_base = OTHER; note = 2'-O-methyladenosine-3'-phosphate
  modified_base 7: mod_base = OTHER; note = 2'-deoxy-2'-fluorouridine-3'-phosphate
  modified_base 8: mod_base = OTHER; note = 2'-O-methyluridine-3'-phosphate
  modified_base 9: mod_base = OTHER; note = 2'-deoxy-2'-fluorouridine-3'-phosphate
  modified_base 10: mod_base = OTHER; note = 2'-deoxy-2'-fluorocytidine-3'-phosphate
  modified_base 11: mod_base = OTHER; note = 2'-deoxy-2'-fluorocytidine-3'-phosphate
  modified_base 12: mod_base = OTHER; note = 2'-O-methyluridine-3'-phosphate
  modified_base 13: mod_base = OTHER; note = 2'-O-methyladenosine-3'-phosphate
  modified_base 14: mod_base = OTHER; note = 2'-O-methylguanosine-3'-phosphate
  modified_base 15: mod_base = OTHER; note = 2'-O-methylguanosine-3'-phosphate
  modified_base 16: mod_base = OTHER; note = 2'-deoxy-2'-fluoroguanosine-3'-phosphate
  modified_base 17: mod_base = OTHER; note = 2'-O-methyluridine-3'-phosphate
  modified_base 18: mod_base = OTHER; note = 2'-O-methyladenosine-3'-phosphate
  modified_base 19: mod_base = OTHER; note = 2'-O-methylcytidine-3'-phosphate
  modified_base 20: mod_base = OTHER; note = 2'-O-methyladenosine-3'-phosphate
  modified_base 21: mod_base = OTHER; note = 2'-O-methyladenosine-3'-phosphate ((2S,4R)-1-[29-[[2-(acetylamino)-2-deoxy-beta-D-galactopyra nosyl]oxy]-14,14-bis[[3-[[3-[[5-[[2-(acetylamino)-2-deoxy-b eta-D-galactopyranosyl]oxy]-1-oxopentyl]amino]propyl]amino] -3-oxopropoxy]methyl]-1,12,19,25-tetraoxo-16-oxa-13,20,24-t riazanonacos-1-yl]-4-hydroxy-2-pyrrolidinyl)methyl ester
ctggtatttcctagggtacaa

SEQ ID NO: 620 - RNA, 21 nt, synthetic construct
  source 1..21: mol_type = other RNA
  modified_base 1: mod_base = OTHER; note = 2'-deoxy-2'-fluorocytidine-3'-phosphorothioate
  modified_base 2: mod_base = OTHER; note = 2'-O-methyluridine-3'-phosphorothioate
  modified_base 3: mod_base = OTHER; note = 2'-deoxy-2'-fluoroguanosine-3'-phosphate
  modified_base 4: mod_base = OTHER; note = 2'-O-methylguanosine-3'-phosphate
  modified_base 5: mod_base = OTHER; note = 2'-deoxy-2'-fluorouridine-3'-phosphate
  modified_base 6: mod_base = OTHER; note = 2'-O-methyladenosine-3'-phosphate
  modified_base 7: mod_base = OTHER; note = 2'-deoxy-2'-fluorouridine-3'-phosphate
  modified_base 8: mod_base = OTHER; note = 2'-O-methyluridine-3'-phosphate
  modified_base 9: mod_base = OTHER; note = 2'-deoxy-2'-fluorouridine-3'-phosphate
  modified_base 10: mod_base = OTHER; note = 2'-deoxy-2'-fluorocytidine-3'-phosphate
  modified_base 11: mod_base = OTHER; note = 2'-deoxy-2'-fluorocytidine-3'-phosphate
  modified_base 12: mod_base = OTHER; note = 2'-O-methyluridine-3'-phosphate
  modified_base 13: mod_base = OTHER; note = 2'-deoxy-2'-fluoroadenosine-3'-phosphate
  modified_base 14: mod_base = OTHER; note = 2'-O-methylguanosine-3'-phosphate
  modified_base 15: mod_base = OTHER; note = 2'-deoxy-2'-fluoroguanosine-3'-phosphate
  modified_base 16: mod_base = OTHER; note = 2'-O-methylguanosine-3'-phosphate
  modified_base 17: mod_base = OTHER; note = 2'-deoxy-2'-fluorouridine-3'-phosphate
  modified_base 18: mod_base = OTHER; note = 2'-O-methyladenosine-3'-phosphate
  modified_base 19: mod_base = OTHER; note = 2'-deoxy-2'-fluorocytidine-3'-phosphate
  modified_base 20: mod_base = OTHER; note = 2'-O-methyladenosine-3'-phosphate
  modified_base 21: mod_base = OTHER; note = 2'-deoxy-2'-fluoroadenosine-3'-phosphate ((2S,4R)-1-[29-[[2-(acetylamino)-2-deoxy-beta-D-galactopyra nosyl]oxy]-14,14-bis[[3-[[3-[[5-[[2-(acetylamino)-2-deoxy-b eta-D-galactopyranosyl]oxy]-1-oxopentyl]amino]propyl]amino] -3-oxopropoxy]methyl]-1,12,19,25-tetraoxo-16-oxa-13,20,24-t riazanonacos-1-yl]-4-hydroxy-2-pyrrolidinyl)methyl ester
ctggtatttcctagggtacaa

SEQ ID NO: 621 - RNA, 21 nt, synthetic construct
  source 1..21: mol_type = other RNA
  modified_base 1: mod_base = OTHER; note = 2'-O-methylcytidine-3'-phosphorothioate
  modified_base 2: mod_base = OTHER; note = 2'-O-methyluridine-3'-phosphorothioate
  modified_base 3: mod_base = OTHER; note = 2'-deoxy-2'-fluoroguanosine-3'-phosphate
  modified_base 4: mod_base = OTHER; note = 2'-O-methylguanosine-3'-phosphate
  modified_base 5: mod_base = OTHER; note = 2'-O-methyluridine-3'-phosphate
  modified_base 6: mod_base = OTHER; note = 2'-O-methyladenosine-3'-phosphate
  modified_base 7: mod_base = OTHER; note = 2'-deoxy-2'-fluorouridine-3'-phosphate
  modified_base 8: mod_base = OTHER; note = 2'-O-methyluridine-3'-phosphate
  modified_base 9: mod_base = OTHER; note = 2'-deoxy-2'-fluorouridine-3'-phosphate
  modified_base 10: mod_base = OTHER; note = 2'-deoxy-2'-fluorocytidine-3'-phosphate
  modified_base 11: mod_base = OTHER; note = 2'-deoxy-2'-fluorocytidine-3'-phosphate
  modified_base 12: mod_base = OTHER; note = 2'-O-methyluridine-3'-phosphate
  modified_base 13: mod_base = OTHER; note = 2'-deoxy-2'-fluoroadenosine-3'-phosphate
  modified_base 14: mod_base = OTHER; note = 2'-O-methylguanosine-3'-phosphate
  modified_base 15: mod_base = OTHER; note = 2'-deoxy-2'-fluoroguanosine-3'-phosphate
  modified_base 16: mod_base = OTHER; note = 2'-O-methylguanosine-3'-phosphate
  modified_base 17: mod_base = OTHER; note = 2'-O-methyluridine-3'-phosphate
  modified_base 18: mod_base = OTHER; note = 2'-deoxy-2'-fluoroadenosine-3'-phosphate
  modified_base 19: mod_base = OTHER; note = 2'-O-methylcytidine-3'-phosphate
  modified_base 20: mod_base = OTHER; note = 2'-O-methyladenosine-3'-phosphate
  modified_base 21: mod_base = OTHER; note = 2'-O-methyladenosine-3'-phosphate ((2S,4R)-1-[29-[[2-(acetylamino)-2-deoxy-beta-D-galactopyra nosyl]oxy]-14,14-bis[[3-[[3-[[5-[[2-(acetylamino)-2-deoxy-b eta-D-galactopyranosyl]oxy]-1-oxopentyl]amino]propyl]amino] -3-oxopropoxy]methyl]-1,12,19,25-tetraoxo-16-oxa-13,20,24-t riazanonacos-1-yl]-4-hydroxy-2-pyrrolidinyl)methyl ester
ctggtatttcctagggtacaa

SEQ ID NO: 622 - RNA, 21 nt, synthetic construct
  source 1..21: mol_type = other RNA
  modified_base 1: mod_base = OTHER; note = 2'-deoxy-2'-fluorocytidine-3'-phosphorothioate
  modified_base 2: mod_base = OTHER; note = 2'-O-methyluridine-3'-phosphorothioate
  modified_base 3: mod_base = OTHER; note = 2'-deoxy-2'-fluoroguanosine-3'-phosphate
  modified_base 4: mod_base = OTHER; note = 2'-O-methylguanosine-3'-phosphate
  modified_base 5: mod_base = OTHER; note = 2'-deoxy-2'-fluorouridine-3'-phosphate
  modified_base 6: mod_base = OTHER; note = 2'-O-methyladenosine-3'-phosphate
  modified_base 7: mod_base = OTHER; note = 2'-deoxy-2'-fluorouridine-3'-phosphate
  modified_base 8: mod_base = OTHER; note = 2'-O-methyluridine-3'-phosphate
  modified_base 9: mod_base = OTHER; note = 2'-deoxy-2'-fluorouridine-3'-phosphate
  modified_base 10: mod_base = OTHER; note = 2'-deoxy-2'-fluorocytidine-3'-phosphate
  modified_base 11: mod_base = OTHER; note = 2'-deoxy-2'-fluorocytidine-3'-phosphate
  modified_base 12: mod_base = OTHER; note = 2'-O-methyluridine-3'-phosphate
  modified_base 13: mod_base = OTHER; note = 2'-deoxy-2'-fluoroadenosine-3'-phosphate
  modified_base 14: mod_base = OTHER; note = 2'-O-methylguanosine-3'-phosphate
  modified_base 15: mod_base = OTHER; note = 2'-deoxy-2'-fluoroguanosine-3'-phosphate
  modified_base 16: mod_base = OTHER; note = 2'-O-methylguanosine-3'-phosphate
  modified_base 17: mod_base = OTHER; note = 2'-deoxy-2'-fluorouridine-3'-phosphate
  modified_base 18: mod_base = OTHER; note = 2'-O-methyladenosine-3'-phosphate
  modified_base 19: mod_base = OTHER; note = 2'-deoxy-2'-fluorocytidine-3'-phosphate
  modified_base 20: mod_base = OTHER; note = 2'-O-methyladenosine-3'-phosphate
  modified_base 21: mod_base = OTHER; note = 2'-deoxy-2'-fluoroadenosine-3'-phosphate ((2S,4R)-1-[29-[[2-(acetylamino)-2-deoxy-beta-D-galactopyra nosyl]oxy]-14,14-bis[[3-[[3-[[5-[[2-(acetylamino)-2-deoxy-b eta-D-galactopyranosyl]oxy]-1-oxopentyl]amino]propyl]amino] -3-oxopropoxy]methyl]-1,12,19,25-tetraoxo-16-oxa-13,20,24-t riazanonacos-1-yl]-4-hydroxy-2-pyrrolidinyl)methyl ester
ctggtatttcctagggtacaa

SEQ ID NO: 623 - RNA, 21 nt, synthetic construct
  source 1..21: mol_type = other RNA
  modified_base 1: mod_base = OTHER; note = 2'-O-methylcytidine-3'-phosphorothioate
  modified_base 2: mod_base = OTHER; note = 2'-O-methyluridine-3'-phosphorothioate
  modified_base 3: mod_base = OTHER; note = 2'-deoxy-2'-fluoroguanosine-3'-phosphate
  modified_base 4: mod_base = OTHER; note = 2'-O-methylguanosine-3'-phosphate
  modified_base 5: mod_base = OTHER; note = 2'-O-methyluridine-3'-phosphate
  modified_base 6: mod_base = OTHER; note = 2'-O-methyladenosine-3'-phosphate
  modified_base 7: mod_base = OTHER; note = 2'-deoxy-2'-fluorouridine-3'-phosphate
  modified_base 8: mod_base = OTHER; note = 2'-O-methyluridine-3'-phosphate
  modified_base 9: mod_base = OTHER; note = 2'-deoxy-2'-fluorouridine-3'-phosphate
  modified_base 10: mod_base = OTHER; note = 2'-deoxy-2'-fluorocytidine-3'-phosphate
  modified_base 11: mod_base = OTHER; note = 2'-deoxy-2'-fluorocytidine-3'-phosphate
  modified_base 12: mod_base = OTHER; note = 2'-O-methyluridine-3'-phosphate
  modified_base 13: mod_base = OTHER; note = 2'-deoxy-2'-fluoroadenosine-3'-phosphate
  modified_base 14: mod_base = OTHER; note = 2'-O-methylguanosine-3'-phosphate
  modified_base 15: mod_base = OTHER; note = 2'-deoxy-2'-fluoroguanosine-3'-phosphate
  modified_base 16: mod_base = OTHER; note = 2'-O-methylguanosine-3'-phosphate
  modified_base 17: mod_base = OTHER; note = 2'-O-methyluridine-3'-phosphate
  modified_base 18: mod_base = OTHER; note = 2'-deoxy-2'-fluoroadenosine-3'-phosphate
  modified_base 19: mod_base = OTHER; note = 2'-O-methylcytidine-3'-phosphate
  modified_base 20: mod_base = OTHER; note = 2'-O-methyladenosine-3'-phosphate
  modified_base 21: mod_base = OTHER; note = 2'-O-methyladenosine-3'-phosphate ((2S,4R)-1-[29-[[2-(acetylamino)-2-deoxy-beta-D-galactopyra nosyl]oxy]-14,14-bis[[3-[[3-[[5-[[2-(acetylamino)-2-deoxy-b eta-D-galactopyranosyl]oxy]-1-oxopentyl]amino]propyl]amino] -3-oxopropoxy]methyl]-1,12,19,25-tetraoxo-16-oxa-13,20,24-t riazanonacos-1-yl]-4-hydroxy-2-pyrrolidinyl)methyl ester
ctggtatttcctagggtacaa

SEQ ID NO: 624 - RNA, 21 nt, synthetic construct
  source 1..21: mol_type = other RNA
  modified_base 1: mod_base = OTHER; note = 2'-deoxy-2'-fluorocytidine-3'-phosphorothioate
  modified_base 2: mod_base = OTHER; note = 2'-O-methyluridine-3'-phosphorothioate
  modified_base 3: mod_base = OTHER; note = 2'-deoxy-2'-fluoroguanosine-3'-phosphate
  modified_base 4: mod_base = OTHER; note = 2'-O-methylguanosine-3'-phosphate
  modified_base 5: mod_base = OTHER; note = 2'-deoxy-2'-fluorouridine-3'-phosphate
  modified_base 6: mod_base = OTHER; note = 2'-O-methyladenosine-3'-phosphate
  modified_base 7: mod_base = OTHER; note = 2'-deoxy-2'-fluorouridine-3'-phosphate
  modified_base 8: mod_base = OTHER; note = 2'-O-methyluridine-3'-phosphate
  modified_base 9: mod_base = OTHER; note = 2'-deoxy-2'-fluorouridine-3'-phosphate
  modified_base 10: mod_base = OTHER; note = 2'-deoxy-2'-fluorocytidine-3'-phosphate
  modified_base 11: mod_base = OTHER; note = 2'-deoxy-2'-fluorocytidine-3'-phosphate
  modified_base 12: mod_base = OTHER; note = 2'-O-methyluridine-3'-phosphate
  modified_base 13: mod_base = OTHER; note = 2'-deoxy-2'-fluoroadenosine-3'-phosphate
  modified_base 14: mod_base = OTHER; note = 2'-O-methylguanosine-3'-phosphate
  modified_base 15: mod_base = OTHER; note = 2'-deoxy-2'-fluoroguanosine-3'-phosphate
  modified_base 16: mod_base = OTHER; note = 2'-O-methylguanosine-3'-phosphate
  modified_base 17: mod_base = OTHER; note = 2'-deoxy-2'-fluorouridine-3'-phosphate
  modified_base 18: mod_base = OTHER; note = 2'-O-methyladenosine-3'-phosphate
  modified_base 19: mod_base = OTHER; note = 2'-deoxy-2'-fluorocytidine-3'-phosphate
  modified_base 20: mod_base = OTHER; note = 2'-O-methyladenosine-3'-phosphate
  modified_base 21: mod_base = OTHER; note = 2'-deoxy-2'-fluoroadenosine-3'-phosphate ((2S,4R)-1-[29-[[2-(acetylamino)-2-deoxy-beta-D-galactopyra nosyl]oxy]-14,14-bis[[3-[[3-[[5-[[2-(acetylamino)-2-deoxy-b eta-D-galactopyranosyl]oxy]-1-oxopentyl]amino]propyl]amino] -3-oxopropoxy]methyl]-1,12,19,25-tetraoxo-16-oxa-13,20,24-t riazanonacos-1-yl]-4-hydroxy-2-pyrrolidinyl)methyl ester
ctggtatttcctagggtacaa

SEQ ID NO: 625 - RNA, 21 nt, synthetic construct
  source 1..21: mol_type = other RNA
  modified_base 1: mod_base = OTHER; note = 2'-O-methylcytidine-3'-phosphorothioate
  modified_base 2: mod_base = OTHER; note = 2'-O-methyluridine-3'-phosphorothioate
  modified_base 3: mod_base = OTHER; note = 2'-deoxy-2'-fluoroguanosine-3'-phosphate
  modified_base 4: mod_base = OTHER; note = 2'-O-methylguanosine-3'-phosphate
  modified_base 5: mod_base = OTHER; note = 2'-deoxy-2'-fluorouridine-3'-phosphate
  modified_base 6: mod_base = OTHER; note = 2'-O-methyladenosine-3'-phosphate
  modified_base 7: mod_base = OTHER; note = 2'-deoxy-2'-fluorouridine-3'-phosphate
  modified_base 8: mod_base = OTHER; note = 2'-O-methyluridine-3'-phosphate
  modified_base 9: mod_base = OTHER; note = 2'-deoxy-2'-fluorouridine-3'-phosphate
  modified_base 10: mod_base = OTHER; note = 2'-deoxy-2'-fluorocytidine-3'-phosphate
  modified_base 11: mod_base = OTHER; note = 2'-deoxy-2'-fluorocytidine-3'-phosphate
  modified_base 12: mod_base = OTHER; note = 2'-O-methyluridine-3'-phosphate
  modified_base 13: mod_base = OTHER; note = 2'-deoxy-2'-fluoroadenosine-3'-phosphate
  modified_base 14: mod_base = OTHER; note = 2'-O-methylguanosine-3'-phosphate
  modified_base 15: mod_base = OTHER; note = 2'-deoxy-2'-fluoroguanosine-3'-phosphate
  modified_base 16: mod_base = OTHER; note = 2'-O-methylguanosine-3'-phosphate
  modified_base 17: mod_base = OTHER; note = 2'-deoxy-2'-fluorouridine-3'-phosphate
  modified_base 18: mod_base = OTHER; note = 2'-O-methyladenosine-3'-phosphate
  modified_base 19: mod_base = OTHER; note = 2'-deoxy-2'-fluorocytidine-3'-phosphate
  modified_base 20: mod_base = OTHER; note = 2'-O-methyladenosine-3'-phosphate
  modified_base 21: mod_base = OTHER; note = 2'-deoxy-2'-fluoroadenosine-3'-phosphate ((2S,4R)-1-[29-[[2-(acetylamino)-2-deoxy-beta-D-galactopyra nosyl]oxy]-14,14-bis[[3-[[3-[[5-[[2-(acetylamino)-2-deoxy-b eta-D-galactopyranosyl]oxy]-1-oxopentyl]amino]propyl]amino] -3-oxopropoxy]methyl]-1,12,19,25-tetraoxo-16-oxa-13,20,24-t riazanonacos-1-yl]-4-hydroxy-2-pyrrolidinyl)methyl ester
ctggtatttcctagggtacaa

SEQ ID NO: 626 - RNA, 21 nt, synthetic construct
  source 1..21: mol_type = other RNA
  modified_base 1: mod_base = OTHER; note = 2'-O-methylcytidine-3'-phosphorothioate
  modified_base 2: mod_base = OTHER; note = 2'-O-methyluridine-3'-phosphorothioate
  modified_base 3: mod_base = OTHER; note = 2'-deoxy-2'-fluoroguanosine-3'-phosphate
  modified_base 4: mod_base = OTHER; note = 2'-O-methylguanosine-3'-phosphate
  modified_base 5: mod_base = OTHER; note = 2'-O-methyluridine-3'-phosphate
  modified_base 6: mod_base = OTHER; note = 2'-O-methyladenosine-3'-phosphate
  modified_base 7: mod_base = OTHER; note = 2'-deoxy-2'-fluorouridine-3'-phosphate
  modified_base 8: mod_base = OTHER; note = 2'-O-methyluridine-3'-phosphate
  modified_base 9: mod_base = OTHER; note = 2'-deoxy-2'-fluorouridine-3'-phosphate
  modified_base 10: mod_base = OTHER; note = 2'-deoxy-2'-fluorocytidine-3'-phosphate
  modified_base 11: mod_base = OTHER; note = 2'-deoxy-2'-fluorocytidine-3'-phosphate
  modified_base 12: mod_base = OTHER; note = 2'-O-methyluridine-3'-phosphate
  modified_base 13: mod_base = OTHER; note = 2'-deoxy-2'-fluoroadenosine-3'-phosphate
  modified_base 14: mod_base = OTHER; note = 2'-O-methylguanosine-3'-phosphate
  modified_base 15: mod_base = OTHER; note = 2'-deoxy-2'-fluoroguanosine-3'-phosphate
  modified_base 16: mod_base = OTHER; note = 2'-O-methylguanosine-3'-phosphate
  modified_base 17: mod_base = OTHER; note = 2'-O-methyluridine-3'-phosphate
  modified_base 18: mod_base = OTHER; note = 2'-deoxy-2'-fluoroadenosine-3'-phosphate
  modified_base 19: mod_base = OTHER; note = 2'-O-methylcytidine-3'-phosphate
  modified_base 20: mod_base = OTHER; note = 2'-O-methyladenosine-3'-phosphate
  modified_base 21: mod_base = OTHER; note = 2'-O-methyladenosine-3'-phosphate ((2S,4R)-1-[29-[[2-(acetylamino)-2-deoxy-beta-D-galactopyra nosyl]oxy]-14,14-bis[[3-[[3-[[5-[[2-(acetylamino)-2-deoxy-b eta-D-galactopyranosyl]oxy]-1-oxopentyl]amino]propyl]amino] -3-oxopropoxy]methyl]-1,12,19,25-tetraoxo-16-oxa-13,20,24-t riazanonacos-1-yl]-4-hydroxy-2-pyrrolidinyl)methyl ester
ctggtatttcctagggtacaa

SEQ ID NO: 627 - RNA, 21 nt, synthetic construct
  source 1..21: mol_type = other RNA
  modified_base 1: mod_base = OTHER; note = 2'-O-methylcytidine-3'-phosphorothioate
  modified_base 2: mod_base = OTHER; note = 2'-O-methyluridine-3'-phosphorothioate
  modified_base 3: mod_base = OTHER; note = 2'-deoxy-2'-fluoroguanosine-3'-phosphate
  modified_base 4: mod_base = OTHER; note = 2'-O-methylguanosine-3'-phosphate
  modified_base 5: mod_base = OTHER; note = 2'-O-methyluridine-3'-phosphate
  modified_base 6: mod_base = OTHER; note = 2'-O-methyladenosine-3'-phosphate
  modified_base 7: mod_base = OTHER; note = 2'-deoxy-2'-fluorouridine-3'-phosphate
  modified_base 8: mod_base = OTHER; note = 2'-O-methyluridine-3'-phosphate
  modified_base 9: mod_base = OTHER; note = 2'-deoxy-2'-fluorouridine-3'-phosphate
  modified_base 10: mod_base = OTHER; note = 2'-deoxy-2'-fluorocytidine-3'-phosphate
  modified_base 11: mod_base = OTHER; note = 2'-deoxy-2'-fluorocytidine-3'-phosphate
  modified_base 12: mod_base = OTHER; note = 2'-O-methyluridine-3'-phosphate
  modified_base 13: mod_base = OTHER; note = 2'-deoxy-2'-fluoroadenosine-3'-phosphate
  modified_base 14: mod_base = OTHER; note = 2'-O-methylguanosine-3'-phosphate
  modified_base 15: mod_base = OTHER; note = 2'-deoxy-2'-fluoroguanosine-3'-phosphate
  modified_base 16: mod_base = OTHER; note = 2'-O-methylguanosine-3'-phosphate
  modified_base 17: mod_base = OTHER; note = 2'-O-methyluridine-3'-phosphate
  modified_base 18: mod_base = OTHER; note = 2'-deoxy-2'-fluoroadenosine-3'-phosphate
  modified_base 19: mod_base = OTHER; note = 2'-O-methylcytidine-3'-phosphate
  modified_base 20: mod_base = OTHER; note = 2'-O-methyladenosine-3'-phosphate
  modified_base 21: mod_base = OTHER; note = 2'-O-methyladenosine-3'-phosphate ((2S,4R)-1-[29-[[2-(acetylamino)-2-deoxy-beta-D-galactopyra nosyl]oxy]-14,14-bis[[3-[[3-[[5-[[2-(acetylamino)-2-deoxy-b eta-D-galactopyranosyl]oxy]-1-oxopentyl]amino]propyl]amino] -3-oxopropoxy]methyl]-1,12,19,25-tetraoxo-16-oxa-13,20,24-t riazanonacos-1-yl]-4-hydroxy-2-pyrrolidinyl)methyl ester
ctggtatttcctagggtacaa

SEQ ID NO: 628 - DNA, 21 bp, synthetic construct
  source 1..21: mol_type = other DNA
  modified_base 1: mod_base = OTHER; note = 2'-O-methylcytidine-3'-phosphorothioate
  modified_base 2: mod_base = OTHER; note = 2'-O-methyluridine-3'-phosphorothioate
  modified_base 3: mod_base = OTHER; note = 2'-O-methylguanosine-3'-phosphate
  modified_base 4: mod_base = OTHER; note = 2'-O-methylguanosine-3'-phosphate
  modified_base 5: mod_base = OTHER; note = 2'-O-methyluridine-3'-phosphate
  modified_base 6: mod_base = OTHER; note = 2'-O-methyladenosine-3'-phosphate
  modified_base 7: mod_base = OTHER; note = 2'-deoxy-2'-fluorouridine-3'-phosphate
  modified_base 8: mod_base = OTHER; note = 2'-O-methyluridine-3'-phosphate
  modified_base 9: mod_base = OTHER; note = 2'-deoxy-2'-fluorouridine-3'-phosphate
  modified_base 10: mod_base = OTHER; note = 2'-deoxy-2'-fluorocytidine-3'-phosphate
  modified_base 12: mod_base = OTHER; note = 2'-O-methyluridine-3'-phosphate
  modified_base 13: mod_base = OTHER; note = 2'-O-methyladenosine-3'-phosphate
  modified_base 14: mod_base = OTHER; note = 2'-O-methylguanosine-3'-phosphate
  modified_base 15: mod_base = OTHER; note = 2'-O-methylguanosine-3'-phosphate
  modified_base 16: mod_base = OTHER; note = 2'-deoxy-2'-fluoroguanosine-3'-phosphate
  modified_base 17: mod_base = OTHER; note = 2'-O-methyluridine-3'-phosphate
  modified_base 18: mod_base = OTHER; note = 2'-O-methyladenosine-3'-phosphate
  modified_base 19: mod_base = OTHER; note = 2'-O-methylcytidine-3'-phosphate
  modified_base 20: mod_base = OTHER; note = 2'-O-methyladenosine-3'-phosphate
  modified_base 21: mod_base = OTHER; note = 2'-O-methyladenosine-3'-phosphate ((2S,4R)-1-[29-[[2-(acetylamino)-2-deoxy-beta-D-galactopyra nosyl]oxy]-14,14-bis[[3-[[3-[[5-[[2-(acetylamino)-2-deoxy-b eta-D-galactopyranosyl]oxy]-1-oxopentyl]amino]propyl]amino] -3-oxopropoxy]methyl]-1,12,19,25-tetraoxo-16-oxa-13,20,24-t riazanonacos-1-yl]-4-hydroxy-2-pyrrolidinyl)methyl ester
  misc_feature 1..10: note = RNA
  misc_feature 12..21: note = RNA
  misc_feature 11: note = DNA
ctggtatttcctagggtacaa

SEQ ID NO: 629 - RNA, 21 nt, synthetic construct
  source 1..21: mol_type = other RNA
  modified_base 1: mod_base = OTHER; note = 2'-deoxy-2'-fluorocytidine-3'-phosphorothioate
  modified_base 2: mod_base = OTHER; note = 2'-O-methyluridine-3'-phosphorothioate
  modified_base 3: mod_base = OTHER; note = 2'-deoxy-2'-fluoroguanosine-3'-phosphate
  modified_base 4: mod_base = OTHER; note = 2'-O-methylguanosine-3'-phosphate
  modified_base 5: mod_base = OTHER; note = 2'-deoxy-2'-fluorouridine-3'-phosphate
  modified_base 6: mod_base = OTHER; note = 2'-O-methyladenosine-3'-phosphate
  modified_base 7: mod_base = OTHER; note = 2'-deoxy-2'-fluorouridine-3'-phosphate
  modified_base 8: mod_base = OTHER; note = 2'-O-methyluridine-3'-phosphate
  modified_base 9: mod_base = OTHER; note = 2'-deoxy-2'-fluorouridine-3'-phosphate
  modified_base 10: mod_base = OTHER; note = 2'-deoxy-2'-fluorocytidine-3'-phosphate
  modified_base 11: mod_base = OTHER; note = 2'-deoxy-2'-fluorocytidine-3'-phosphate
  modified_base 12: mod_base = OTHER; note = 2'-O-methyluridine-3'-phosphate
  modified_base 13: mod_base = OTHER; note = 2'-deoxy-2'-fluoroadenosine-3'-phosphate
  modified_base 14: mod_base = OTHER; note = 2'-O-methylguanosine-3'-phosphate
  modified_base 15: mod_base = OTHER; note = 2'-deoxy-2'-fluoroguanosine-3'-phosphate
  modified_base 16: mod_base = OTHER; note = 2'-O-methylguanosine-3'-phosphate
  modified_base 17: mod_base = OTHER; note = 2'-deoxy-2'-fluorouridine-3'-phosphate
  modified_base 18: mod_base = OTHER; note = 2'-O-methyladenosine-3'-phosphate
  modified_base 19: mod_base = OTHER; note = 2'-deoxy-2'-fluorocytidine-3'-phosphate
  modified_base 20: mod_base = OTHER; note = 2'-O-methyladenosine-3'-phosphate
  modified_base 21: mod_base = OTHER; note = 2'-deoxy-2'-fluoroadenosine-3'-phosphate ((2S,4R)-1-[29-[[2-(acetylamino)-2-deoxy-beta-D-galactopyra nosyl]oxy]-14,14-bis[[3-[[3-[[5-[[2-(acetylamino)-2-deoxy-b eta-D-galactopyranosyl]oxy]-1-oxopentyl]amino]propyl]amino] -3-oxopropoxy]methyl]-1,12,19,25-tetraoxo-16-oxa-13,20,24-t riazanonacos-1-yl]-4-hydroxy-2-pyrrolidinyl)methyl ester
ctggtatttcctagggtacaa

SEQ ID NO: 630 - RNA, 21 nt, synthetic construct
  source 1..21: mol_type = other RNA
  modified_base 1: mod_base = OTHER; note = 2'-O-methylcytidine-3'-phosphorothioate
  modified_base 2: mod_base = OTHER; note = 2'-O-methyluridine-3'-phosphorothioate
  modified_base 3: mod_base = OTHER; note = 2'-O-methylguanosine-3'-phosphate
  modified_base 4: mod_base = OTHER; note = 2'-O-methylguanosine-3'-phosphate
  modified_base 5: mod_base = OTHER; note = 2'-O-methyluridine-3'-phosphate
  modified_base 6: mod_base = OTHER; note = 2'-deoxy-2'-fluoroadenosine-3'-phosphate
  modified_base 7: mod_base = OTHER; note = 2'-O-methyluridine-3'-phosphate
  modified_base 8: mod_base = OTHER; note = 2'-O-methyluridine-3'-phosphate
  modified_base 9: mod_base = OTHER; note = 2'-deoxy-2'-fluorouridine-3'-phosphate
  modified_base 10: mod_base = OTHER; note = 2'-O-methylcytidine-3'-phosphate
  modified_base 11: mod_base = OTHER; note = 2'-deoxy-2'-fluorocytidine-3'-phosphate
  modified_base 12: mod_base = OTHER; note = 2'-deoxy-2'-fluorouridine-3'-phosphate
  modified_base 13: mod_base = OTHER; note = 2'-O-methyladenosine-3'-phosphate
  modified_base 14: mod_base = OTHER; note = 2'-O-methylguanosine-3'-phosphate
  modified_base 15: mod_base = OTHER; note = 2'-deoxy-2'-fluoroguanosine-3'-phosphate
  modified_base 16: mod_base = OTHER; note = 2'-deoxy-2'-fluoroguanosine-3'-phosphate
  modified_base 17: mod_base = OTHER; note = 2'-O-methyluridine-3'-phosphate
  modified_base 18: mod_base = OTHER; note = 2'-O-methyladenosine-3'-phosphate
  modified_base 19: mod_base = OTHER; note = 2'-O-methylcytidine-3'-phosphate
  modified_base 20: mod_base = OTHER; note = 2'-O-methyladenosine-3'-phosphate
  modified_base 21: mod_base = OTHER; note = 2'-O-methyladenosine-3'-phosphate ((2S,4R)-1-[29-[[2-(acetylamino)-2-deoxy-beta-D-galactopyra nosyl]oxy]-14,14-bis[[3-[[3-[[5-[[2-(acetylamino)-2-deoxy-b eta-D-galactopyranosyl]oxy]-1-oxopentyl]amino]propyl]amino] -3-oxopropoxy]methyl]-1,12,19,25-tetraoxo-16-oxa-13,20,24-t riazanonacos-1-yl]-4-hydroxy-2-pyrrolidinyl)methyl ester
ctggtatttcctagggtacaa

SEQ ID NO: 631 - DNA, 21 bp, synthetic construct
  source 1..21: mol_type = other DNA
  modified_base 1: mod_base = OTHER; note = 2'-O-methylcytidine-3'-phosphorothioate
  modified_base 2: mod_base = OTHER; note = 2'-O-methyluridine-3'-phosphorothioate
  modified_base 3: mod_base = OTHER; note = 2'-O-methylguanosine-3'-phosphate
  modified_base 4: mod_base = OTHER; note = 2'-O-methylguanosine-3'-phosphate
  modified_base 5: mod_base = OTHER; note = 2'-O-methyluridine-3'-phosphate
  modified_base 6: mod_base = OTHER; note = 2'-O-methyladenosine-3'-phosphate
  modified_base 7: mod_base = OTHER; note = 2'-deoxy-2'-fluorouridine-3'-phosphate
  modified_base 8: mod_base = OTHER; note = 2'-O-methyluridine-3'-phosphate
  modified_base 9: mod_base = OTHER; note = 2'-deoxy-2'-fluorouridine-3'-phosphate
  modified_base 10: mod_base = OTHER; note = 2'-deoxy-2'-fluorocytidine-3'-phosphate
  modified_base 11: mod_base = OTHER; note = 2'-deoxy-2'-fluorocytidine-3'-phosphate
  modified_base 12: mod_base = OTHER; note = 2'-O-methyluridine-3'-phosphate
  modified_base 13: mod_base = OTHER; note = 2'-O-methyladenosine-3'-phosphate
  modified_base 14: mod_base = OTHER; note = 2'-O-methylguanosine-3'-phosphate
  modified_base 15: mod_base = OTHER; note = 2'-O-methylguanosine-3'-phosphate
  modified_base 16: mod_base = OTHER; note = 2'-deoxy-2'-fluoroguanosine-3'-phosphate
  modified_base 18: mod_base = OTHER; note = 2'-O-methyladenosine-3'-phosphate
  modified_base 19: mod_base = OTHER; note = 2'-O-methylcytidine-3'-phosphate
  modified_base 20: mod_base = OTHER; note = 2'-O-methyladenosine-3'-phosphate
  modified_base 21: mod_base = OTHER; note = 2'-O-methyladenosine-3'-phosphate ((2S,4R)-1-[29-[[2-(acetylamino)-2-deoxy-beta-D-galactopyra nosyl]oxy]-14,14-bis[[3-[[3-[[5-[[2-(acetylamino)-2-deoxy-b eta-D-galactopyranosyl]oxy]-1-oxopentyl]amino]propyl]amino] -3-oxopropoxy]methyl]-1,12,19,25-tetraoxo-16-oxa-13,20,24-t riazanonacos-1-yl]-4-hydroxy-2-pyrrolidinyl)methyl ester
  misc_feature 1..16: note = RNA
  misc_feature 18..21: note = RNA
  misc_feature 17: note = DNA
ctggtatttcctagggtacaa

SEQ ID NO: 632 - RNA, 21 nt, synthetic construct
  source 1..21: mol_type = other RNA
  modified_base 1: mod_base = OTHER; note = 2'-O-methylcytidine-3'-phosphorothioate
  modified_base 2: mod_base = OTHER; note = 2'-O-methyluridine-3'-phosphorothioate
  modified_base 3: mod_base = OTHER; note = 2'-deoxy-2'-fluoroguanosine-3'-phosphate
  modified_base 4: mod_base = OTHER; note = 2'-O-methylguanosine-3'-phosphate
  modified_base 5: mod_base = OTHER; note = 2'-O-methyluridine-3'-phosphate
  modified_base 6: mod_base = OTHER; note = 2'-O-methyladenosine-3'-phosphate
  modified_base 7: mod_base = OTHER; note = 2'-deoxy-2'-fluorouridine-3'-phosphate
  modified_base 8: mod_base = OTHER; note = 2'-O-methyluridine-3'-phosphate
  modified_base 9: mod_base = OTHER; note = 2'-deoxy-2'-fluorouridine-3'-phosphate
  modified_base 10: mod_base = OTHER; note = 2'-deoxy-2'-fluorocytidine-3'-phosphate
  modified_base 11: mod_base = OTHER; note = 2'-deoxy-2'-fluorocytidine-3'-phosphate
  modified_base 12: mod_base = OTHER; note = 2'-O-methyluridine-3'-phosphate
  modified_base 13: mod_base = OTHER; note = 2'-deoxy-2'-fluoroadenosine-3'-phosphate
  modified_base 14: mod_base = OTHER; note = 2'-O-methylguanosine-3'-phosphate
  modified_base 15: mod_base = OTHER; note = 2'-deoxy-2'-fluoroguanosine-3'-phosphate
  modified_base 16: mod_base = OTHER; note = 2'-O-methylguanosine-3'-phosphate
  modified_base 17: mod_base = OTHER; note = 2'-O-methyluridine-3'-phosphate
  modified_base 18: mod_base = OTHER; note = 2'-deoxy-2'-fluoroadenosine-3'-phosphate
  modified_base 19: mod_base = OTHER; note = 2'-O-methylcytidine-3'-phosphate
  modified_base 20: mod_base = OTHER; note = 2'-O-methyladenosine-3'-phosphate
  modified_base 21: mod_base = OTHER; note = 2'-O-methyladenosine-3'-phosphate ((2S,4R)-1-[29-[[2-(acetylamino)-2-deoxy-beta-D-galactopyra nosyl]oxy]-14,14-bis[[3-[[3-[[5-[[2-(acetylamino)-2-deoxy-b eta-D-galactopyranosyl]oxy]-1-oxopentyl]amino]propyl]amino] -3-oxopropoxy]methyl]-1,12,19,25-tetraoxo-16-oxa-13,20,24-t riazanonacos-1-yl]-4-hydroxy-2-pyrrolidinyl)methyl ester
ctggtatttcctagggtacaa

SEQ ID NO: 633 - RNA, 21 nt, synthetic construct
  source 1..21: mol_type = other RNA
  modified_base 1: mod_base = OTHER; note = 2'-O-methylcytidine-3'-phosphorothioate
  modified_base 2: mod_base = OTHER; note = 2'-O-methyluridine-3'-phosphorothioate
  modified_base 3: mod_base = OTHER; note = 2'-deoxy-2'-fluoroguanosine-3'-phosphate
  modified_base 4: mod_base = OTHER; note = 2'-O-methylguanosine-3'-phosphate
  modified_base 5: mod_base = OTHER; note = 2'-O-methyluridine-3'-phosphate
  modified_base 6: mod_base = OTHER; note = 2'-O-methyladenosine-3'-phosphate
  modified_base 7: mod_base = OTHER; note = 2'-deoxy-2'-fluorouridine-3'-phosphate
  modified_base 8: mod_base = OTHER; note = 2'-O-methyluridine-3'-phosphate
  modified_base 9: mod_base = OTHER; note = 2'-deoxy-2'-fluorouridine-3'-phosphate
  modified_base 10: mod_base = OTHER; note = 2'-deoxy-2'-fluorocytidine-3'-phosphate
  modified_base 11: mod_base = OTHER; note = 2'-deoxy-2'-fluorocytidine-3'-phosphate
  modified_base 12: mod_base = OTHER; note = 2'-O-methyluridine-3'-phosphate
  modified_base 13: mod_base = OTHER; note = 2'-deoxy-2'-fluoroadenosine-3'-phosphate
  modified_base 14: mod_base = OTHER; note = 2'-O-methylguanosine-3'-phosphate
  modified_base 15: mod_base = OTHER; note = 2'-deoxy-2'-fluoroguanosine-3'-phosphate
  modified_base 16: mod_base = OTHER; note = 2'-O-methylguanosine-3'-phosphate
  modified_base 17: mod_base = OTHER; note = 2'-O-methyluridine-3'-phosphate
  modified_base 18: mod_base = OTHER; note = 2'-deoxy-2'-fluoroadenosine-3'-phosphate
  modified_base 19: mod_base = OTHER; note = 2'-O-methylcytidine-3'-phosphate
  modified_base 20: mod_base = OTHER; note = 2'-O-methyladenosine-3'-phosphate
  modified_base 21: mod_base = OTHER; note = 2'-O-methyladenosine-3'-phosphate ((2S,4R)-1-[29-[[2-(acetylamino)-2-deoxy-beta-D-galactopyra nosyl]oxy]-14,14-bis[[3-[[3-[[5-[[2-(acetylamino)-2-deoxy-b eta-D-galactopyranosyl]oxy]-1-oxopentyl]amino]propyl]amino] -3-oxopropoxy]methyl]-1,12,19,25-tetraoxo-16-oxa-13,20,24-t riazanonacos-1-yl]-4-hydroxy-2-pyrrolidinyl)methyl ester
ctggtatttcctagggtacaa

SEQ ID NO: 634 - RNA, 21 nt, synthetic construct
  source 1..21: mol_type = other RNA
  modified_base 1: mod_base = OTHER; note = 2'-deoxy-2'-fluorocytidine-3'-phosphorothioate
  modified_base 2: mod_base = OTHER; note = 2'-O-methyluridine-3'-phosphorothioate
  modified_base 3: mod_base = OTHER; note = 2'-deoxy-2'-fluoroguanosine-3'-phosphate
  modified_base 4: mod_base = OTHER; note = 2'-O-methylguanosine-3'-phosphate
  modified_base 5: mod_base = OTHER; note = 2'-deoxy-2'-fluorouridine-3'-phosphate
  modified_base 6: mod_base = OTHER; note = 2'-O-methyladenosine-3'-phosphate
  modified_base 7: mod_base = OTHER; note = 2'-deoxy-2'-fluorouridine-3'-phosphate
  modified_base 8: mod_base = OTHER; note = 2'-O-methyluridine-3'-phosphate
  modified_base 9: mod_base = OTHER; note = 2'-deoxy-2'-fluorouridine-3'-phosphate
  modified_base 10: mod_base = OTHER; note = 2'-deoxy-2'-fluorocytidine-3'-phosphate
  modified_base 11: mod_base = OTHER; note = 2'-deoxy-2'-fluorocytidine-3'-phosphate
  modified_base 12: mod_base = OTHER; note = 2'-O-methyluridine-3'-phosphate
  modified_base 13: mod_base = OTHER; note = 2'-deoxy-2'-fluoroadenosine-3'-phosphate
  modified_base 14: mod_base = OTHER; note = 2'-O-methylguanosine-3'-phosphate
  modified_base 15: mod_base = OTHER; note = 2'-deoxy-2'-fluoroguanosine-3'-phosphate
  modified_base 16: mod_base = OTHER; note = 2'-O-methylguanosine-3'-phosphate
  modified_base 17: mod_base = OTHER; note = 2'-deoxy-2'-fluorouridine-3'-phosphate
  modified_base 18: mod_base = OTHER; note = 2'-O-methyladenosine-3'-phosphate
  modified_base 19: mod_base = OTHER; note = 2'-deoxy-2'-fluorocytidine-3'-phosphate
  modified_base 20: mod_base = OTHER; note = 2'-O-methyladenosine-3'-phosphate
  modified_base 21: mod_base = OTHER; note = 2'-deoxy-2'-fluoroadenosine-3'-phosphate ((2S,4R)-1-[29-[[2-(acetylamino)-2-deoxy-beta-D-galactopyra nosyl]oxy]-14,14-bis[[3-[[3-[[5-[[2-(acetylamino)-2-deoxy-b eta-D-galactopyranosyl]oxy]-1-oxopentyl]amino]propyl]amino] -3-oxopropoxy]methyl]-1,12,19,25-tetraoxo-16-oxa-13,20,24-t riazanonacos-1-yl]-4-hydroxy-2-pyrrolidinyl)methyl ester
ctggtatttcctagggtacaa

SEQ ID NO: 635 - RNA, 21 nt, synthetic construct
  source 1..21: mol_type = other RNA
  modified_base 1: mod_base = OTHER; note = 2'-deoxy-2'-fluorocytidine-3'-phosphorothioate
  modified_base 2: mod_base = OTHER; note = 2'-O-methyluridine-3'-phosphorothioate
  modified_base 3: mod_base = OTHER; note = 2'-deoxy-2'-fluoroguanosine-3'-phosphate
  modified_base 4: mod_base = OTHER; note = 2'-O-methylguanosine-3'-phosphate
  modified_base 5: mod_base = OTHER; note = 2'-deoxy-2'-fluorouridine-3'-phosphate
  modified_base 6: mod_base = OTHER; note = 2'-O-methyladenosine-3'-phosphate
  modified_base 7: mod_base = OTHER; note = 2'-deoxy-2'-fluorouridine-3'-phosphate
  modified_base 8: mod_base = OTHER; note = 2'-O-methyluridine-3'-phosphate
  modified_base 9: mod_base = OTHER; note = 2'-deoxy-2'-fluorouridine-3'-phosphate
  modified_base 10: mod_base = OTHER; note = 2'-deoxy-2'-fluorocytidine-3'-phosphate
  modified_base 11: mod_base = OTHER; note = 2'-deoxy-2'-fluorocytidine-3'-phosphate
  modified_base 12: mod_base = OTHER; note = 2'-O-methyluridine-3'-phosphate
  modified_base 13: mod_base = OTHER; note = 2'-deoxy-2'-fluoroadenosine-3'-phosphate
  modified_base 14: mod_base = OTHER; note = 2'-O-methylguanosine-3'-phosphate
  modified_base 15: mod_base = OTHER; note = 2'-deoxy-2'-fluoroguanosine-3'-phosphate
  modified_base 16: mod_base = OTHER; note = 2'-O-methylguanosine-3'-phosphate
  modified_base 17: mod_base = OTHER; note = 2'-deoxy-2'-fluorouridine-3'-phosphate
  modified_base 18: mod_base = OTHER; note = 2'-O-methyladenosine-3'-phosphate
  modified_base 19: mod_base = OTHER; note = 2'-deoxy-2'-fluorocytidine-3'-phosphate
  modified_base 20: mod_base = OTHER; note = 2'-O-methyladenosine-3'-phosphate
  modified_base 21: mod_base = OTHER; note = 2'-deoxy-2'-fluoroadenosine-3'-phosphate ((2S,4R)-1-[29-[[2-(acetylamino)-2-deoxy-beta-D-galactopyra nosyl]oxy]-14,14-bis[[3-[[3-[[5-[[2-(acetylamino)-2-deoxy-b eta-D-galactopyranosyl]oxy]-1-oxopentyl]amino]propyl]amino] -3-oxopropoxy]methyl]-1,12,19,25-tetraoxo-16-oxa-13,20,24-t riazanonacos-1-yl]-4-hydroxy-2-pyrrolidinyl)methyl ester
ctggtatttcctagggtacaa

SEQ ID NO: 636 - DNA, 21 bp, synthetic construct
  source 1..21: mol_type = other DNA
  modified_base 1: mod_base = OTHER; note = 2'-O-methylcytidine-3'-phosphorothioate
  modified_base 2: mod_base = OTHER; note = 2'-O-methyluridine-3'-phosphorothioate
  modified_base 3: mod_base = OTHER; note = 2'-O-methylguanosine-3'-phosphate
  modified_base 4: mod_base = OTHER; note = 2'-O-methylguanosine-3'-phosphate
  modified_base 5: mod_base = OTHER; note = 2'-O-methyluridine-3'-phosphate
  modified_base 6: mod_base = OTHER; note = 2'-O-methyladenosine-3'-phosphate
  modified_base 7: mod_base = OTHER; note = 2'-deoxy-2'-fluorouridine-3'-phosphate
  modified_base 8: mod_base = OTHER; note = 2'-O-methyluridine-3'-phosphate
  modified_base 9: mod_base = OTHER; note = 2'-deoxy-2'-fluorouridine-3'-phosphate
  modified_base 10: mod_base = OTHER; note = 2'-deoxy-2'-fluorocytidine-3'-phosphate
  modified_base 11: mod_base = OTHER; note = 2'-deoxy-2'-fluorocytidine-3'-phosphate
  modified_base 12: mod_base = OTHER; note = 2'-O-methyluridine-3'-phosphate
  modified_base 13: mod_base = OTHER; note = 2'-O-methyladenosine-3'-phosphate
  modified_base 14: mod_base = OTHER; note = 2'-O-methylguanosine-3'-phosphate
  modified_base 15: mod_base = OTHER; note = 2'-O-methylguanosine-3'-phosphate
  modified_base 16: mod_base = OTHER; note = 2'-deoxy-2'-fluoroguanosine-3'-phosphate
  modified_base 17: mod_base = OTHER; note = 2'-O-methyluridine-3'-phosphate
  modified_base 18: mod_base = OTHER; note = 2'-O-methyladenosine-3'-phosphate
  modified_base 20: mod_base = OTHER; note = 2'-O-methyladenosine-3'-phosphate
  modified_base 21: mod_base = OTHER; note = 2'-O-methyladenosine-3'-phosphate ((2S,4R)-1-[29-[[2-(acetylamino)-2-deoxy-beta-D-galactopyra nosyl]oxy]-14,14-bis[[3-[[3-[[5-[[2-(acetylamino)-2-deoxy-b eta-D-galactopyranosyl]oxy]-1-oxopentyl]amino]propyl]amino] -3-oxopropoxy]methyl]-1,12,19,25-tetraoxo-16-oxa-13,20,24-t riazanonacos-1-yl]-4-hydroxy-2-pyrrolidinyl)methyl ester
  misc_feature 1..18: note = RNA
  misc_feature 20..21: note = RNA
  misc_feature 19: note = DNA
ctggtatttcctagggtacaa

SEQ ID NO: 637 - DNA, 21 bp, synthetic construct
  source 1..21: mol_type = other DNA
  modified_base 1: mod_base = OTHER; note = 2'-O-methylcytidine-3'-phosphorothioate
  modified_base 2: mod_base = OTHER; note = 2'-O-methyluridine-3'-phosphorothioate
  modified_base 3: mod_base = OTHER; note = 2'-O-methylguanosine-3'-phosphate
  modified_base 4: mod_base = OTHER; note = 2'-O-methylguanosine-3'-phosphate
  modified_base 5: mod_base = OTHER; note = 2'-O-methyluridine-3'-phosphate
  modified_base 6: mod_base = OTHER; note = 2'-O-methyladenosine-3'-phosphate
  modified_base 7: mod_base = OTHER; note = 2'-O-methyluridine-3'-phosphate
  modified_base 8: mod_base = OTHER; note = 2'-O-methyluridine-3'-phosphate
  modified_base 9: mod_base = OTHER; note = 2'-O-methyluridine-3'-phosphate
  modified_base 10: mod_base = OTHER; note = 2'-O-methylcytidine-3'-phosphate
  modified_base 12: mod_base = OTHER; note = 2'-O-methyluridine-3'-phosphate
  modified_base 13: mod_base = OTHER; note = 2'-O-methyladenosine-3'-phosphate
  modified_base 14: mod_base = OTHER; note = 2'-O-methylguanosine-3'-phosphate
  modified_base 15: mod_base = OTHER; note = 2'-O-methylguanosine-3'-phosphate
  modified_base 16: mod_base = OTHER; note = 2'-O-methylguanosine-3'-phosphate
  modified_base 17: mod_base = OTHER; note = Thymidine-glycol nucleic acid (GNA), S-Isomer
  modified_base 18: mod_base = OTHER; note = 2'-O-methyladenosine-3'-phosphate
  modified_base 19: mod_base = OTHER; note = 2'-O-methylcytidine-3'-phosphate
  modified_base 20: mod_base = OTHER; note = 2'-O-methyladenosine-3'-phosphate
  modified_base 21: mod_base = OTHER; note = 2'-O-methyladenosine-3'-phosphate ((2S,4R)-1-[29-[[2-(acetylamino)-2-deoxy-beta-D-galactopyra nosyl]oxy]-14,14-bis[[3-[[3-[[5-[[2-(acetylamino)-2-deoxy-b eta-D-galactopyranosyl]oxy]-1-oxopentyl]amino]propyl]amino] -3-oxopropoxy]methyl]-1,12,19,25-tetraoxo-16-oxa-13,20,24-t riazanonacos-1-yl]-4-hydroxy-2-pyrrolidinyl)methyl ester
  misc_feature 1..10: note = RNA
  misc_feature 12..21: note = RNA
  misc_feature 11: note = DNA
ctggtatttcctagggtacaa

SEQ ID NO: 638 - RNA, 21 nt, synthetic construct
  source 1..21: mol_type = other RNA
  modified_base 1: mod_base = OTHER; note = 2'-O-methylcytidine-3'-phosphorothioate
  modified_base 2: mod_base = OTHER; note = 2'-O-methyluridine-3'-phosphorothioate
  modified_base 3: mod_base = OTHER; note = 2'-deoxy-2'-fluoroguanosine-3'-phosphate
  modified_base 4: mod_base = OTHER; note = 2'-O-methylguanosine-3'-phosphate
  modified_base 5: mod_base = OTHER; note = 2'-O-methyluridine-3'-phosphate
  modified_base 6: mod_base = OTHER; note = 2'-O-methyladenosine-3'-phosphate
  modified_base 7: mod_base = OTHER; note = 2'-deoxy-2'-fluorouridine-3'-phosphate
  modified_base 8: mod_base = OTHER; note = 2'-O-methyluridine-3'-phosphate
  modified_base 9: mod_base = OTHER; note = 2'-deoxy-2'-fluorouridine-3'-phosphate
  modified_base 10: mod_base = OTHER; note = 2'-deoxy-2'-fluorocytidine-3'-phosphate
  modified_base 11: mod_base = OTHER; note = 2'-deoxy-2'-fluorocytidine-3'-phosphate
  modified_base 12: mod_base = OTHER; note = 2'-O-methyluridine-3'-phosphate
  modified_base 13: mod_base = OTHER; note = 2'-deoxy-2'-fluoroadenosine-3'-phosphate
  modified_base 14: mod_base = OTHER; note = 2'-O-methylguanosine-3'-phosphate
  modified_base 15: mod_base = OTHER; note = 2'-deoxy-2'-fluoroguanosine-3'-phosphate
  modified_base 16: mod_base = OTHER; note = 2'-O-methylguanosine-3'-phosphate
  modified_base 17: mod_base = OTHER; note = 2'-O-methyluridine-3'-phosphate
  modified_base 18: mod_base = OTHER; note = 2'-deoxy-2'-fluoroadenosine-3'-phosphate
  modified_base 19: mod_base = OTHER; note = 2'-O-methylcytidine-3'-phosphate
  modified_base 20: mod_base = OTHER; note = 2'-O-methyladenosine-3'-phosphate
  modified_base 21: mod_base = OTHER; note = 2'-O-methyladenosine-3'-phosphate ((2S,4R)-1-[29-[[2-(acetylamino)-2-deoxy-beta-D-galactopyra nosyl]oxy]-14,14-bis[[3-[[3-[[5-[[2-(acetylamino)-2-deoxy-b eta-D-galactopyranosyl]oxy]-1-oxopentyl]amino]propyl]amino] -3-oxopropoxy]methyl]-1,12,19,25-tetraoxo-16-oxa-13,20,24-t riazanonacos-1-yl]-4-hydroxy-2-pyrrolidinyl)methyl ester
ctggtatttcctagggtacaa

SEQ ID NO: 639 - RNA, 21 nt, synthetic construct
  source 1..21: mol_type = other RNA
  modified_base 1: mod_base = OTHER; note = 2'-O-methylcytidine-3'-phosphorothioate
  modified_base 2: mod_base = OTHER; note = 2'-O-methyluridine-3'-phosphorothioate
  modified_base 3: mod_base = OTHER; note = 2'-O-methylguanosine-3'-phosphate
  modified_base 4: mod_base = OTHER; note = 2'-O-methylguanosine-3'-phosphate
  modified_base 5: mod_base = OTHER; note = 2'-O-methyluridine-3'-phosphate
  modified_base 6: mod_base = OTHER; note = 2'-deoxy-2'-fluoroadenosine-3'-phosphate
  modified_base 7: mod_base = OTHER; note = 2'-O-methyluridine-3'-phosphate
  modified_base 8: mod_base = OTHER; note = 2'-O-methyluridine-3'-phosphate
  modified_base 9: mod_base = OTHER; note = 2'-O-methyluridine-3'-phosphate
  modified_base 10: mod_base = OTHER; note = 2'-deoxy-2'-fluorocytidine-3'-phosphate
  modified_base 11: mod_base = OTHER; note = 2'-deoxy-2'-fluorocytidine-3'-phosphate
  modified_base 12: mod_base = OTHER; note = 2'-O-methyluridine-3'-phosphate
  modified_base 13: mod_base = OTHER; note = 2'-deoxy-2'-fluoroadenosine-3'-phosphate
  modified_base 14: mod_base = OTHER; note = 2'-O-methylguanosine-3'-phosphate
  modified_base 15: mod_base = OTHER; note = 2'-O-methylguanosine-3'-phosphate
  modified_base 16: mod_base = OTHER; note = 2'-deoxy-2'-fluoroguanosine-3'-phosphate
  modified_base 17: mod_base = OTHER; note = 2'-O-methyluridine-3'-phosphate
  modified_base 18: mod_base = OTHER; note = 2'-O-methyladenosine-3'-phosphate
  modified_base 19: mod_base = OTHER; note = 2'-O-methylcytidine-3'-phosphate
  modified_base 20: mod_base = OTHER; note = 2'-O-methyladenosine-3'-phosphate
  modified_base 21: mod_base = OTHER; note = 2'-O-methyladenosine-3'-phosphate ((2S,4R)-1-[29-[[2-(acetylamino)-2-deoxy-beta-D-galactopyra nosyl]oxy]-14,14-bis[[3-[[3-[[5-[[2-(acetylamino)-2-deoxy-b eta-D-galactopyranosyl]oxy]-1-oxopentyl]amino]propyl]amino] -3-oxopropoxy]methyl]-1,12,19,25-tetraoxo-16-oxa-13,20,24-t riazanonacos-1-yl]-4-hydroxy-2-pyrrolidinyl)methyl ester
ctggtatttcctagggtacaa

SEQ ID NO: 640 - RNA, 21 nt, synthetic construct
  source 1..21: mol_type = other RNA
  modified_base 1: mod_base = OTHER; note = 2'-O-methylcytidine-3'-phosphorothioate
  modified_base 2: mod_base = OTHER; note = 2'-O-methyluridine-3'-phosphorothioate
  modified_base 3: mod_base = OTHER; note = 2'-deoxy-2'-fluoroguanosine-3'-phosphate
  modified_base 4: mod_base = OTHER; note = 2'-O-methylguanosine-3'-phosphate
  modified_base 5: mod_base = OTHER; note = 2'-O-methyluridine-3'-phosphate
  modified_base 6: mod_base = OTHER; note = 2'-O-methyladenosine-3'-phosphate
  modified_base 7: mod_base = OTHER; note = 2'-deoxy-2'-fluorouridine-3'-phosphate
  modified_base 8: mod_base = OTHER; note = 2'-O-methyluridine-3'-phosphate
  modified_base 9: mod_base = OTHER; note = 2'-deoxy-2'-fluorouridine-3'-phosphate
  modified_base 10: mod_base = OTHER; note = 2'-deoxy-2'-fluorocytidine-3'-phosphate
  modified_base 11: mod_base = OTHER; note = 2'-deoxy-2'-fluorocytidine-3'-phosphate
  modified_base 12: mod_base = OTHER; note = 2'-O-methyluridine-3'-phosphate
  modified_base 13: mod_base = OTHER; note = 2'-deoxy-2'-fluoroadenosine-3'-phosphate
  modified_base 14: mod_base = OTHER; note = 2'-O-methylguanosine-3'-phosphate
  modified_base 15: mod_base = OTHER; note = 2'-deoxy-2'-fluoroguanosine-3'-phosphate
  modified_base 16: mod_base = OTHER; note = 2'-O-methylguanosine-3'-phosphate
  modified_base 17: mod_base = OTHER; note = 2'-O-methyluridine-3'-phosphate
  modified_base 18: mod_base = OTHER; note = 2'-deoxy-2'-fluoroadenosine-3'-phosphate
  modified_base 19: mod_base = OTHER; note = 2'-O-methylcytidine-3'-phosphate
  modified_base 20: mod_base = OTHER; note = 2'-O-methyladenosine-3'-phosphate
  modified_base 21: mod_base = OTHER; note = 2'-O-methyladenosine-3'-phosphate ((2S,4R)-1-[29-[[2-(acetylamino)-2-deoxy-beta-D-galactopyra nosyl]oxy]-14,14-bis[[3-[[3-[[5-[[2-(acetylamino)-2-deoxy-b eta-D-galactopyranosyl]oxy]-1-oxopentyl]amino]propyl]amino] -3-oxopropoxy]methyl]-1,12,19,25-tetraoxo-16-oxa-13,20,24-t riazanonacos-1-yl]-4-hydroxy-2-pyrrolidinyl)methyl ester
ctggtatttcctagggtacaa

SEQ ID NO: 641 - DNA, 21 bp, synthetic construct
  source 1..21: mol_type = other DNA
  modified_base 1: mod_base = OTHER; note = 2'-O-methylcytidine-3'-phosphorothioate
  modified_base 2: mod_base = OTHER; note = 2'-O-methyluridine-3'-phosphorothioate
  modified_base 3: mod_base = OTHER; note = 2'-O-methylguanosine-3'-phosphate
  modified_base 4: mod_base = OTHER; note = 2'-O-methylguanosine-3'-phosphate
  modified_base 5: mod_base = OTHER; note = 2'-O-methyluridine-3'-phosphate
  modified_base 6: mod_base = OTHER; note = 2'-deoxy-2'-fluoroadenosine-3'-phosphate
  modified_base 7: mod_base = OTHER; note = 2'-O-methyluridine-3'-phosphate
  modified_base 8: mod_base = OTHER; note = 2'-O-methyluridine-3'-phosphate
  modified_base 9: mod_base = OTHER; note = 2'-O-methyluridine-3'-phosphate
  modified_base 10: mod_base = OTHER; note = 2'-O-methylcytidine-3'-phosphate
  modified_base 11: mod_base = OTHER; note = 2'-deoxy-2'-fluorocytidine-3'-phosphate
  modified_base 12: mod_base = OTHER; note = 2'-O-methyluridine-3'-phosphate
  modified_base 13: mod_base = OTHER; note = 2'-O-methyladenosine-3'-phosphate
  modified_base 14: mod_base = OTHER; note = 2'-O-methylguanosine-3'-phosphate
  modified_base 15: mod_base = OTHER; note = 2'-O-methylguanosine-3'-phosphate
  modified_base 16: mod_base = OTHER; note = 2'-O-methylguanosine-3'-phosphate
  modified_base 18: mod_base = OTHER; note = 2'-O-methyladenosine-3'-phosphate
  modified_base 19: mod_base = OTHER; note = 2'-O-methylcytidine-3'-phosphate
  modified_base 20: mod_base = OTHER; note = 2'-O-methyladenosine-3'-phosphate
  modified_base 21: mod_base = OTHER; note = 2'-O-methyladenosine-3'-phosphate ((2S,4R)-1-[29-[[2-(acetylamino)-2-deoxy-beta-D-galactopyra nosyl]oxy]-14,14-bis[[3-[[3-[[5-[[2-(acetylamino)-2-deoxy-b eta-D-galactopyranosyl]oxy]-1-oxopentyl]amino]propyl]amino] -3-oxopropoxy]methyl]-1,12,19,25-tetraoxo-16-oxa-13,20,24-t riazanonacos-1-yl]-4-hydroxy-2-pyrrolidinyl)methyl ester
  misc_feature 1..16: note = RNA
  misc_feature 18..21: note = RNA
  misc_feature 17: note = DNA
ctggtatttcctagggtacaa

SEQ ID NO: 642 - RNA, 21 nt, synthetic construct
  source 1..21: mol_type = other RNA
  modified_base 1: mod_base = OTHER; note = 2'-O-methylcytidine-3'-phosphorothioate
  modified_base 2: mod_base = OTHER; note = 2'-O-methyluridine-3'-phosphorothioate
  modified_base 3: mod_base = OTHER; note = 2'-O-methylguanosine-3'-phosphate
  modified_base 4: mod_base = OTHER; note = 2'-O-methylguanosine-3'-phosphate
  modified_base 5: mod_base = OTHER; note = 2'-O-methyluridine-3'-phosphate
  modified_base 6: mod_base = OTHER; note = 2'-deoxy-2'-fluoroadenosine-3'-phosphate
  modified_base 7: mod_base = OTHER; note = 2'-O-methyluridine-3'-phosphate
  modified_base 8: mod_base = OTHER; note = 2'-O-methyluridine-3'-phosphate
  modified_base 9: mod_base = OTHER; note = 2'-O-methyluridine-3'-phosphate
  modified_base 10: mod_base = OTHER; note = 2'-deoxy-2'-fluorocytidine-3'-phosphate
  modified_base 11: mod_base = OTHER; note = 2'-deoxy-2'-fluorocytidine-3'-phosphate
  modified_base 12: mod_base = OTHER; note = 2'-O-methyluridine-3'-phosphate
  modified_base 13: mod_base = OTHER; note = 2'-deoxy-2'-fluoroadenosine-3'-phosphate
  modified_base 14: mod_base = OTHER; note = 2'-O-methylguanosine-3'-phosphate
  modified_base 15: mod_base = OTHER; note = 2'-O-methylguanosine-3'-phosphate
  modified_base 16: mod_base = OTHER; note = 2'-deoxy-2'-fluoroguanosine-3'-phosphate
  modified_base 17: mod_base = OTHER; note = 2'-O-methyluridine-3'-phosphate
  modified_base 18: mod_base = OTHER; note = 2'-O-methyladenosine-3'-phosphate
  modified_base 19: mod_base = OTHER; note = 2'-O-methylcytidine-3'-phosphate
  modified_base 20: mod_base = OTHER; note = 2'-O-methyladenosine-3'-phosphate
  modified_base 21: mod_base = OTHER; note = 2'-O-methyladenosine-3'-phosphate ((2S,4R)-1-[29-[[2-(acetylamino)-2-deoxy-beta-D-galactopyra nosyl]oxy]-14,14-bis[[3-[[3-[[5-[[2-(acetylamino)-2-deoxy-b eta-D-galactopyranosyl]oxy]-1-oxopentyl]amino]propyl]amino] -3-oxopropoxy]methyl]-1,12,19,25-tetraoxo-16-oxa-13,20,24-t riazanonacos-1-yl]-4-hydroxy-2-pyrrolidinyl)methyl ester
ctggtatttcctagggtacaa

SEQ ID NO: 643 - RNA, 21 nt, synthetic construct
  source 1..21: mol_type = other RNA
  modified_base 1: mod_base = OTHER; note = 2'-O-methylcytidine-3'-phosphorothioate
  modified_base 2: mod_base = OTHER; note = 2'-O-methyluridine-3'-phosphorothioate
  modified_base 3: mod_base = OTHER; note = 2'-O-methylguanosine-3'-phosphate
  modified_base 4: mod_base = OTHER; note = 2'-O-methylguanosine-3'-phosphate
  modified_base 5: mod_base = OTHER; note = 2'-O-methyluridine-3'-phosphate
  modified_base 6: mod_base = OTHER; note = 2'-deoxy-2'-fluoroadenosine-3'-phosphate
  modified_base 7: mod_base = OTHER; note = 2'-O-methyluridine-3'-phosphate
  modified_base 8: mod_base = OTHER; note = 2'-O-methyluridine-3'-phosphate
  modified_base 9: mod_base = OTHER; note = 2'-O-methyluridine-3'-phosphate
  modified_base 10: mod_base = OTHER; note = 2'-O-methylcytidine-3'-phosphate
  modified_base 11: mod_base = OTHER; note = 2'-deoxy-2'-fluorocytidine-3'-phosphate
  modified_base 12: mod_base = OTHER; note = 2'-O-methyluridine-3'-phosphate
  modified_base 13: mod_base = OTHER; note = 2'-O-methyladenosine-3'-phosphate
  modified_base 14: mod_base = OTHER; note = 2'-O-methylguanosine-3'-phosphate
  modified_base 15: mod_base = OTHER; note = 2'-O-methylguanosine-3'-phosphate
  modified_base 16: mod_base = OTHER; note = 2'-O-methylguanosine-3'-phosphate
  modified_base 17: mod_base = OTHER; note = 2'-O-methyluridine-3'-phosphate
  modified_base 18: mod_base = OTHER; note = 2'-O-methyladenosine-3'-phosphate
  modified_base 19: mod_base = OTHER; note = 2'-O-methylcytidine-3'-phosphate
  modified_base 20: mod_base = OTHER; note = 2'-O-methyladenosine-3'-phosphate
  modified_base 21: mod_base = OTHER; note = 2'-O-methyladenosine-3'-phosphate ((2S,4R)-1-[29-[[2-(acetylamino)-2-deoxy-beta-D-galactopyra nosyl]oxy]-14,14-bis[[3-[[3-[[5-[[2-(acetylamino)-2-deoxy-b eta-D-galactopyranosyl]oxy]-1-oxopentyl]amino]propyl]amino] -3-oxopropoxy]methyl]-1,12,19,25-tetraoxo-16-oxa-13,20,24-t riazanonacos-1-yl]-4-hydroxy-2-pyrrolidinyl)methyl ester
ctggtatttcctagggtacaa

SEQ ID NO: 644 - DNA, 21 bp, synthetic construct
  source 1..21: mol_type = other DNA
  modified_base 1: mod_base = OTHER; note = 2'-O-methylcytidine-3'-phosphorothioate
  modified_base 2: mod_base = OTHER; note = 2'-O-methyluridine-3'-phosphorothioate
  modified_base 3: mod_base = OTHER; note = 2'-O-methylguanosine-3'-phosphate
  modified_base 4: mod_base = OTHER; note = 2'-O-methylguanosine-3'-phosphate
  modified_base 5: mod_base = OTHER; note = 2'-O-methyluridine-3'-phosphate
  modified_base 6: mod_base = OTHER; note = 2'-deoxy-2'-fluoroadenosine-3'-phosphate
  modified_base 7: mod_base = OTHER; note = 2'-O-methyluridine-3'-phosphate
  modified_base 8: mod_base = OTHER; note = 2'-O-methyluridine-3'-phosphate
  modified_base 9: mod_base = OTHER; note = 2'-O-methyluridine-3'-phosphate
  modified_base 10: mod_base = OTHER; note = 2'-O-methylcytidine-3'-phosphate
  modified_base 11: mod_base = OTHER; note = 2'-deoxy-2'-fluorocytidine-3'-phosphate
  modified_base 13: mod_base = OTHER; note = 2'-O-methyladenosine-3'-phosphate
  modified_base 14: mod_base = OTHER; note = 2'-O-methylguanosine-3'-phosphate
  modified_base 15: mod_base = OTHER; note = 2'-O-methylguanosine-3'-phosphate
  modified_base 16: mod_base = OTHER; note = 2'-O-methylguanosine-3'-phosphate
  modified_base 17: mod_base = OTHER; note = 2'-O-methyluridine-3'-phosphate
  modified_base 18: mod_base = OTHER; note = 2'-O-methyladenosine-3'-phosphate
  modified_base 19: mod_base = OTHER; note = 2'-O-methylcytidine-3'-phosphate
  modified_base 20: mod_base = OTHER; note = 2'-O-methyladenosine-3'-phosphate
  modified_base 21: mod_base = OTHER; note = 2'-O-methyladenosine-3'-phosphate ((2S,4R)-1-[29-[[2-(acetylamino)-2-deoxy-beta-D-galactopyra nosyl]oxy]-14,14-bis[[3-[[3-[[5-[[2-(acetylamino)-2-deoxy-b eta-D-galactopyranosyl]oxy]-1-oxopentyl]amino]propyl]amino] -3-oxopropoxy]methyl]-1,12,19,25-tetraoxo-16-oxa-13,20,24-t riazanonacos-1-yl]-4-hydroxy-2-pyrrolidinyl)methyl ester
  misc_feature 1..11: note = RNA
  misc_feature 13..21: note = RNA
  misc_feature 12: note = DNA
ctggtatttcctagggtacaa

SEQ ID NO: 645 - DNA, 21 bp, synthetic construct
  source 1..21: mol_type = other DNA
  modified_base 1: mod_base = OTHER; note = 2'-O-methylcytidine-3'-phosphorothioate
  modified_base 2: mod_base = OTHER; note = 2'-O-methyluridine-3'-phosphorothioate
  modified_base 3: mod_base = OTHER; note = 2'-O-methylguanosine-3'-phosphate
  modified_base 4: mod_base = OTHER; note = 2'-O-methylguanosine-3'-phosphate
  modified_base 5: mod_base = OTHER; note = 2'-O-methyluridine-3'-phosphate
  modified_base 6: mod_base = OTHER; note = 2'-O-methyladenosine-3'-phosphate
  modified_base 7: mod_base = OTHER; note = 2'-O-methyluridine-3'-phosphate
  modified_base 8: mod_base = OTHER; note = 2'-O-methyluridine-3'-phosphate
  modified_base 9: mod_base = OTHER; note = 2'-O-methyluridine-3'-phosphate
  modified_base 10: mod_base = OTHER; note = 2'-O-methylcytidine-3'-phosphate
  modified_base 11: mod_base = OTHER; note = 2'-deoxy-2'-fluorocytidine-3'-phosphate
  modified_base 13: mod_base = OTHER; note = 2'-O-methyladenosine-3'-phosphate
  modified_base 14: mod_base = OTHER; note = 2'-O-methylguanosine-3'-phosphate
  modified_base 15: mod_base = OTHER; note = 2'-O-methylguanosine-3'-phosphate
  modified_base 16: mod_base = OTHER; note = 2'-O-methylguanosine-3'-phosphate
  modified_base 17: mod_base = OTHER; note = 2'-O-methyluridine-3'-phosphate
  modified_base 18: mod_base = OTHER; note = 2'-O-methyladenosine-3'-phosphate
  modified_base 19: mod_base = OTHER; note = 2'-O-methylcytidine-3'-phosphate
  modified_base 20: mod_base = OTHER; note = 2'-O-methyladenosine-3'-phosphate
  modified_base 21: mod_base = OTHER; note = 2'-O-methyladenosine-3'-phosphate ((2S,4R)-1-[29-[[2-(acetylamino)-2-deoxy-beta-D-galactopyra nosyl]oxy]-14,14-bis[[3-[[3-[[5-[[2-(acetylamino)-2-deoxy-b eta-D-galactopyranosyl]oxy]-1-oxopentyl]amino]propyl]amino] -3-oxopropoxy]methyl]-1,12,19,25-tetraoxo-16-oxa-13,20,24-t riazanonacos-1-yl]-4-hydroxy-2-pyrrolidinyl)methyl ester
  misc_feature 1..11: note = RNA
  misc_feature 13..21: note = RNA
  misc_feature 12: note = DNA
ctggtatttcctagggtacaa

SEQ ID NO: 646 - DNA, 21 bp, synthetic construct
  source 1..21: mol_type = other DNA
  modified_base 1: mod_base = OTHER; note = 2'-O-methylcytidine-3'-phosphorothioate
  modified_base 2: mod_base = OTHER; note = 2'-O-methyluridine-3'-phosphorothioate
  modified_base 3: mod_base = OTHER; note = 2'-O-methylguanosine-3'-phosphate
  modified_base 4: mod_base = OTHER; note = 2'-O-methylguanosine-3'-phosphate
  modified_base 5: mod_base = OTHER; note = 2'-O-methyluridine-3'-phosphate
  modified_base 6: mod_base = OTHER; note = 2'-deoxy-2'-fluoroadenosine-3'-phosphate
  modified_base 7: mod_base = OTHER; note = 2'-O-methyluridine-3'-phosphate
  modified_base 8: mod_base = OTHER; note = 2'-O-methyluridine-3'-phosphate
  modified_base 9: mod_base = OTHER; note = 2'-O-methyluridine-3'-phosphate
  modified_base 10: mod_base = OTHER; note = 2'-O-methylcytidine-3'-phosphate
  modified_base 11: mod_base = OTHER; note = 2'-deoxy-2'-fluorocytidine-3'-phosphate
  modified_base 13: mod_base = OTHER; note = 2'-O-methyladenosine-3'-phosphate
  modified_base 14: mod_base = OTHER; note = 2'-O-methylguanosine-3'-phosphate
  modified_base 15: mod_base = OTHER; note = 2'-O-methylguanosine-3'-phosphate
  modified_base 16: mod_base = OTHER; note = 2'-O-methylguanosine-3'-phosphate
  modified_base 17: mod_base = OTHER; note = 2'-O-methyluridine-3'-phosphate
  modified_base 18: mod_base = OTHER; note = 2'-O-methyladenosine-3'-phosphate
  modified_base 19: mod_base = OTHER; note = 2'-O-methylcytidine-3'-phosphate
  modified_base 20: mod_base = OTHER; note = 2'-O-methyladenosine-3'-phosphate
  modified_base 21: mod_base = OTHER; note = 2'-O-methyladenosine-3'-phosphate ((2S,4R)-1-[29-[[2-(acetylamino)-2-deoxy-beta-D-galactopyra nosyl]oxy]-14,14-bis[[3-[[3-[[5-[[2-(acetylamino)-2-deoxy-b eta-D-galactopyranosyl]oxy]-1-oxopentyl]amino]propyl]amino] -3-oxopropoxy]methyl]-1,12,19,25-tetraoxo-16-oxa-13,20,24-t riazanonacos-1-yl]-4-hydroxy-2-pyrrolidinyl)methyl ester
  misc_feature 1..11: note = RNA
  misc_feature 13..21: note = RNA
  misc_feature 12: note = DNA
ctggtatttcctagggtacaa

SEQ ID NO: 647 - RNA, 21 nt, synthetic construct
  source 1..21: mol_type = other RNA
  modified_base 1: mod_base = OTHER; note = 2'-deoxy-2'-fluorocytidine-3'-phosphorothioate
  modified_base 2: mod_base = OTHER; note = 2'-O-methyluridine-3'-phosphorothioate
  modified_base 3: mod_base = OTHER; note = 2'-deoxy-2'-fluoroguanosine-3'-phosphate
  modified_base 4: mod_base = OTHER; note = 2'-O-methylguanosine-3'-phosphate
  modified_base 5: mod_base = OTHER; note = 2'-deoxy-2'-fluorouridine-3'-phosphate
  modified_base 6: mod_base = OTHER; note = 2'-O-methyladenosine-3'-phosphate
  modified_base 7: mod_base = OTHER; note = 2'-deoxy-2'-fluorouridine-3'-phosphate
  modified_base 8: mod_base = OTHER; note = 2'-O-methyluridine-3'-phosphate
  modified_base 9: mod_base = OTHER; note = 2'-deoxy-2'-fluorouridine-3'-phosphate
  modified_base 10: mod_base = OTHER; note = 2'-deoxy-2'-fluorocytidine-3'-phosphate
  modified_base 11: mod_base = OTHER; note = 2'-O-methylcytidine-3'-phosphate
  modified_base 12: mod_base = OTHER; note = 2'-O-methyluridine-3'-phosphate
  modified_base 13: mod_base = OTHER; note = 2'-deoxy-2'-fluoroadenosine-3'-phosphate
  modified_base 14: mod_base = OTHER; note = 2'-O-methylguanosine-3'-phosphate
  modified_base 15: mod_base = OTHER; note = 2'-deoxy-2'-fluoroguanosine-3'-phosphate
  modified_base 16: mod_base = OTHER; note = 2'-O-methylguanosine-3'-phosphate
  modified_base 17: mod_base = OTHER; note = 2'-deoxy-2'-fluorouridine-3'-phosphate
  modified_base 18: mod_base = OTHER; note = 2'-O-methyladenosine-3'-phosphate
  modified_base 19: mod_base = OTHER; note = 2'-deoxy-2'-fluorocytidine-3'-phosphate
  modified_base 20: mod_base = OTHER; note = 2'-O-methyladenosine-3'-phosphate
  modified_base 21: mod_base = OTHER; note = 2'-deoxy-2'-fluoroadenosine-3'-phosphate ((2S,4R)-1-[29-[[2-(acetylamino)-2-deoxy-beta-D-galactopyra nosyl]oxy]-14,14-bis[[3-[[3-[[5-[[2-(acetylamino)-2-deoxy-b eta-D-galactopyranosyl]oxy]-1-oxopentyl]amino]propyl]amino] -3-oxopropoxy]methyl]-1,12,19,25-tetraoxo-16-oxa-13,20,24-t riazanonacos-1-yl]-4-hydroxy-2-pyrrolidinyl)methyl ester
ctggtatttcctagggtacaa

SEQ ID NO: 648 - DNA, 21 bp, synthetic construct
  source 1..21: mol_type = other DNA
  modified_base 1: mod_base = OTHER; note = 2'-O-methylcytidine-3'-phosphorothioate
  modified_base 2: mod_base = OTHER; note = 2'-O-methyluridine-3'-phosphorothioate
  modified_base 3: mod_base = OTHER; note = 2'-O-methylguanosine-3'-phosphate
  modified_base 4: mod_base = OTHER; note = 2'-O-methylguanosine-3'-phosphate
  modified_base 5: mod_base = OTHER; note = 2'-O-methyluridine-3'-phosphate
  modified_base 6: mod_base = OTHER; note = 2'-deoxy-2'-fluoroadenosine-3'-phosphate
  modified_base 7: mod_base = OTHER; note = 2'-O-methyluridine-3'-phosphate
  modified_base 8: mod_base = OTHER; note = 2'-O-methyluridine-3'-phosphate
  modified_base 9: mod_base = OTHER; note = 2'-O-methyluridine-3'-phosphate
  modified_base 10: mod_base = OTHER; note = 2'-O-methylcytidine-3'-phosphate
  modified_base 11: mod_base = OTHER; note = 2'-deoxy-2'-fluorocytidine-3'-phosphate
  modified_base 12: mod_base = OTHER; note = 2'-O-methyluridine-3'-phosphate
  modified_base 13: mod_base = OTHER; note = 2'-O-methyladenosine-3'-phosphate
  modified_base 14: mod_base = OTHER; note = 2'-O-methylguanosine-3'-phosphate
  modified_base 15: mod_base = OTHER; note = 2'-O-methylguanosine-3'-phosphate
  modified_base 16: mod_base = OTHER; note = 2'-O-methylguanosine-3'-phosphate
  modified_base 17: mod_base = OTHER; note = 2'-O-methyluridine-3'-phosphate
  modified_base 18: mod_base = OTHER; note = 2'-O-methyladenosine-3'-phosphate
  modified_base 20: mod_base = OTHER; note = 2'-O-methyladenosine-3'-phosphate
  modified_base 21: mod_base = OTHER; note = 2'-O-methyladenosine-3'-phosphate ((2S,4R)-1-[29-[[2-(acetylamino)-2-deoxy-beta-D-galactopyra nosyl]oxy]-14,14-bis[[3-[[3-[[5-[[2-(acetylamino)-2-deoxy-b eta-D-galactopyranosyl]oxy]-1-oxopentyl]amino]propyl]amino] -3-oxopropoxy]methyl]-1,12,19,25-tetraoxo-16-oxa-13,20,24-t riazanonacos-1-yl]-4-hydroxy-2-pyrrolidinyl)methyl ester
  misc_feature 1..18: note = RNA
  misc_feature 20..21: note = RNA
  misc_feature 19: note = DNA
ctggtatttcctagggtacaa

SEQ ID NO: 649 - DNA, 21 bp, synthetic construct
  source 1..21: mol_type = other DNA
  modified_base 1: mod_base = OTHER; note = 2'-O-methylcytidine-3'-phosphorothioate
  modified_base 2: mod_base = OTHER; note = 2'-O-methyluridine-3'-phosphorothioate
  modified_base 3: mod_base = OTHER; note = 2'-O-methylguanosine-3'-phosphate
  modified_base 4: mod_base = OTHER; note = 2'-O-methylguanosine-3'-phosphate
  modified_base 5: mod_base = OTHER; note = 2'-O-methyluridine-3'-phosphate
  modified_base 6: mod_base = OTHER; note = 2'-deoxy-2'-fluoroadenosine-3'-phosphate
  modified_base 7: mod_base = OTHER; note = 2'-O-methyluridine-3'-phosphate
  modified_base 8: mod_base = OTHER; note = 2'-O-methyluridine-3'-phosphate
  modified_base 9: mod_base = OTHER; note = 2'-O-methyluridine-3'-phosphate
  modified_base 10: mod_base = OTHER; note = 2'-O-methylcytidine-3'-phosphate
  modified_base 11: mod_base = OTHER; note = 2'-deoxy-2'-fluorocytidine-3'-phosphate
  modified_base 12: mod_base = OTHER; note = 2'-O-methyluridine-3'-phosphate
  modified_base 13: mod_base = OTHER; note = 2'-O-methyladenosine-3'-phosphate
  modified_base 14: mod_base = OTHER; note = 2'-O-methylguanosine-3'-phosphate
  modified_base 15: mod_base = OTHER; note = 2'-O-methylguanosine-3'-phosphate
  modified_base 16: mod_base = OTHER; note = 2'-O-methylguanosine-3'-phosphate
  modified_base 18: mod_base = OTHER; note = 2'-O-methyladenosine-3'-phosphate
  modified_base 19: mod_base = OTHER; note = 2'-O-methylcytidine-3'-phosphate
  modified_base 20: mod_base = OTHER; note = 2'-O-methyladenosine-3'-phosphate
  modified_base 21: mod_base = OTHER; note = 2'-O-methyladenosine-3'-phosphate ((2S,4R)-1-[29-[[2-(acetylamino)-2-deoxy-beta-D-galactopyra nosyl]oxy]-14,14-bis[[3-[[3-[[5-[[2-(acetylamino)-2-deoxy-b eta-D-galactopyranosyl]oxy]-1-oxopentyl]amino]propyl]amino] -3-oxopropoxy]methyl]-1,12,19,25-tetraoxo-16-oxa-13,20,24-t riazanonacos-1-yl]-4-hydroxy-2-pyrrolidinyl)methyl ester
  misc_feature 1..16: note = RNA
  misc_feature 18..21: note = RNA
  misc_feature 17: note = DNA
ctggtatttcctagggtacaa

SEQ ID NO: 650 - RNA, 21 nt, synthetic construct
  source 1..21: mol_type = other RNA
  modified_base 1: mod_base = OTHER; note = 2'-O-methylcytidine-3'-phosphorothioate
  modified_base 2: mod_base = OTHER; note = 2'-O-methyluridine-3'-phosphorothioate
  modified_base 3: mod_base = OTHER; note = 2'-O-methylguanosine-3'-phosphate
  modified_base 4: mod_base = OTHER; note = 2'-O-methylguanosine-3'-phosphate
  modified_base 5: mod_base = OTHER; note = 2'-O-methyluridine-3'-phosphate
  modified_base 6: mod_base = OTHER; note = 2'-O-methyladenosine-3'-phosphate
  modified_base 7: mod_base = OTHER; note = 2'-O-methyluridine-3'-phosphate
  modified_base 8: mod_base = OTHER; note = 2'-O-methyluridine-3'-phosphate
  modified_base 9: mod_base = OTHER; note = 2'-O-methyluridine-3'-phosphate
  modified_base 10: mod_base = OTHER; note = 2'-O-methylcytidine-3'-phosphate
  modified_base 11: mod_base = OTHER; note = 2'-deoxy-2'-fluorocytidine-3'-phosphate
  modified_base 12: mod_base = OTHER; note = 2'-deoxy-2'-fluorouridine-3'-phosphate
  modified_base 13: mod_base = OTHER; note = 2'-O-methyladenosine-3'-phosphate
  modified_base 14: mod_base = OTHER; note = 2'-O-methylguanosine-3'-phosphate
  modified_base 15: mod_base = OTHER; note = 2'-O-methylguanosine-3'-phosphate
  modified_base 16: mod_base = OTHER; note = 2'-O-methylguanosine-3'-phosphate
  modified_base 17: mod_base = OTHER; note = 2'-O-methyluridine-3'-phosphate
  modified_base 18: mod_base = OTHER; note = 2'-O-methyladenosine-3'-phosphate
  modified_base 19: mod_base = OTHER; note = 2'-O-methylcytidine-3'-phosphate
  modified_base 20: mod_base = OTHER; note = 2'-O-methyladenosine-3'-phosphate
  modified_base 21: mod_base = OTHER; note = 2'-O-methyladenosine-3'-phosphate ((2S,4R)-1-[29-[[2-(acetylamino)-2-deoxy-beta-D-galactopyra nosyl]oxy]-14,14-bis[[3-[[3-[[5-[[2-(acetylamino)-2-deoxy-b eta-D-galactopyranosyl]oxy]-1-oxopentyl]amino]propyl]amino] -3-oxopropoxy]methyl]-1,12,19,25-tetraoxo-16-oxa-13,20,24-t riazanonacos-1-yl]-4-hydroxy-2-pyrrolidinyl)methyl ester
ctggtatttcctagggtacaa

SEQ ID NO: 651 - DNA, 21 bp, synthetic construct
  source 1..21: mol_type = other DNA
  modified_base 1: mod_base = OTHER; note = 2'-O-methylcytidine-3'-phosphorothioate
  modified_base 2: mod_base = OTHER; note = 2'-O-methyluridine-3'-phosphorothioate
  modified_base 3: mod_base = OTHER; note = 2'-O-methylguanosine-3'-phosphate
  modified_base 4: mod_base = OTHER; note = 2'-O-methylguanosine-3'-phosphate
  modified_base 5: mod_base = OTHER; note = 2'-O-methyluridine-3'-phosphate
  modified_base 6: mod_base = OTHER; note = 2'-O-methyladenosine-3'-phosphate
  modified_base 7: mod_base = OTHER; note = 2'-deoxy-2'-fluorouridine-3'-phosphate
  modified_base 8: mod_base = OTHER; note = 2'-O-methyluridine-3'-phosphate
  modified_base 9: mod_base = OTHER; note = 2'-deoxy-2'-fluorouridine-3'-phosphate
  modified_base 10: mod_base = OTHER; note = 2'-deoxy-2'-fluorocytidine-3'-phosphate
  modified_base 12: mod_base = OTHER; note = 2'-O-methyluridine-3'-phosphate
  modified_base 13: mod_base = OTHER; note = 2'-O-methyladenosine-3'-phosphate
  modified_base 14: mod_base = OTHER; note = 2'-O-methylguanosine-3'-phosphate
  modified_base 15: mod_base = OTHER; note = 2'-O-methylguanosine-3'-phosphate
  modified_base 16: mod_base = OTHER; note = 2'-deoxy-2'-fluoroguanosine-3'-phosphate
  modified_base 17: mod_base = OTHER; note = 2'-O-methyluridine-3'-phosphate
  modified_base 18: mod_base = OTHER; note = 2'-O-methyladenosine-3'-phosphate
  modified_base 19: mod_base = OTHER; note = 2'-O-methylcytidine-3'-phosphate
  modified_base 20: mod_base = OTHER; note = 2'-O-methyladenosine-3'-phosphate
  modified_base 21: mod_base = OTHER; note = 2'-O-methyladenosine-3'-phosphate ((2S,4R)-1-[29-[[2-(acetylamino)-2-deoxy-beta-D-galactopyra nosyl]oxy]-14,14-bis[[3-[[3-[[5-[[2-(acetylamino)-2-deoxy-b eta-D-galactopyranosyl]oxy]-1-oxopentyl]amino]propyl]amino] -3-oxopropoxy]methyl]-1,12,19,25-tetraoxo-16-oxa-13,20,24-t riazanonacos-1-yl]-4-hydroxy-2-pyrrolidinyl)methyl ester
  misc_feature 1..10: note = RNA
  misc_feature 12..21: note = RNA
  misc_feature 11: note = DNA
ctggtatttcctagggtacaa

SEQ ID NO: 652 - RNA, 21 nt, synthetic construct
  source 1..21: mol_type = other RNA
  modified_base 1: mod_base = OTHER; note = 2'-O-methylcytidine-3'-phosphorothioate
  modified_base 2: mod_base = OTHER; note = 2'-O-methyluridine-3'-phosphorothioate
  modified_base 3: mod_base = OTHER; note = 2'-O-methylguanosine-3'-phosphate
  modified_base 4: mod_base = OTHER; note = 2'-O-methylguanosine-3'-phosphate
  modified_base 5: mod_base = OTHER; note = 2'-O-methyluridine-3'-phosphate
  modified_base 6: mod_base = OTHER; note = 2'-deoxy-2'-fluoroadenosine-3'-phosphate
  modified_base 7: mod_base = OTHER; note = 2'-O-methyluridine-3'-phosphate
  modified_base 8: mod_base = OTHER; note = 2'-O-methyluridine-3'-phosphate
  modified_base 9: mod_base = OTHER; note = 2'-deoxy-2'-fluorouridine-3'-phosphate
  modified_base 10: mod_base = OTHER; note = 2'-O-methylcytidine-3'-phosphate
  modified_base 11: mod_base = OTHER; note = 2'-deoxy-2'-fluorocytidine-3'-phosphate
  modified_base 12: mod_base = OTHER; note = 2'-deoxy-2'-fluorouridine-3'-phosphate
  modified_base 13: mod_base = OTHER; note = 2'-O-methyladenosine-3'-phosphate
  modified_base 14: mod_base = OTHER; note = 2'-O-methylguanosine-3'-phosphate
  modified_base 15: mod_base = OTHER; note = 2'-deoxy-2'-fluoroguanosine-3'-phosphate
  modified_base 16: mod_base = OTHER; note = 2'-deoxy-2'-fluoroguanosine-3'-phosphate
  modified_base 17: mod_base = OTHER; note = 2'-O-methyluridine-3'-phosphate
  modified_base 18: mod_base = OTHER; note = 2'-O-methyladenosine-3'-phosphate
  modified_base 19: mod_base = OTHER; note = 2'-O-methylcytidine-3'-phosphate
  modified_base 20: mod_base = OTHER; note = 2'-O-methyladenosine-3'-phosphate
  modified_base 21: mod_base = OTHER; note = 2'-O-methyladenosine-3'-phosphate ((2S,4R)-1-[29-[[2-(acetylamino)-2-deoxy-beta-D-galactopyra nosyl]oxy]-14,14-bis[[3-[[3-[[5-[[2-(acetylamino)-2-deoxy-b eta-D-galactopyranosyl]oxy]-1-oxopentyl]amino]propyl]amino] -3-oxopropoxy]methyl]-1,12,19,25-tetraoxo-16-oxa-13,20,24-t riazanonacos-1-yl]-4-hydroxy-2-pyrrolidinyl)methyl ester
ctggtatttcctagggtacaa

SEQ ID NO: 653 - RNA, 21 nt, synthetic construct
  source 1..21: mol_type = other RNA
  modified_base 1: mod_base = OTHER; note = 2'-deoxy-2'-fluorocytidine-3'-phosphorothioate
  modified_base 2: mod_base = OTHER; note = 2'-O-methyluridine-3'-phosphorothioate
  modified_base 3: mod_base = OTHER; note = 2'-deoxy-2'-fluoroguanosine-3'-phosphate
  modified_base 4: mod_base = OTHER; note = 2'-O-methylguanosine-3'-phosphate
  modified_base 5: mod_base = OTHER; note = 2'-deoxy-2'-fluorouridine-3'-phosphate
  modified_base 6: mod_base = OTHER; note = 2'-O-methyladenosine-3'-phosphate
  modified_base 7: mod_base = OTHER; note = 2'-deoxy-2'-fluorouridine-3'-phosphate
  modified_base 8: mod_base = OTHER; note = 2'-O-methyluridine-3'-phosphate
  modified_base 9: mod_base = OTHER; note = 2'-deoxy-2'-fluorouridine-3'-phosphate
  modified_base 10: mod_base = OTHER; note = 2'-deoxy-2'-fluorocytidine-3'-phosphate
  modified_base 11: mod_base = OTHER; note = 2'-deoxy-2'-fluorocytidine-3'-phosphate
  modified_base 12: mod_base = OTHER; note = 2'-O-methyluridine-3'-phosphate
  modified_base 13: mod_base = OTHER; note = 2'-deoxy-2'-fluoroadenosine-3'-phosphate
  modified_base 14: mod_base = OTHER; note = 2'-O-methylguanosine-3'-phosphate
  modified_base 15: mod_base = OTHER; note = 2'-deoxy-2'-fluoroguanosine-3'-phosphate
  modified_base 16: mod_base = OTHER; note = 2'-O-methylguanosine-3'-phosphate
  modified_base 17: mod_base = OTHER; note = 2'-deoxy-2'-fluorouridine-3'-phosphate
  modified_base 18: mod_base = OTHER; note = 2'-O-methyladenosine-3'-phosphate
  modified_base 19: mod_base = OTHER; note = 2'-deoxy-2'-fluorocytidine-3'-phosphate
  modified_base 20: mod_base = OTHER; note = 2'-O-methyladenosine-3'-phosphate
  modified_base 21: mod_base = OTHER; note = 2'-deoxy-2'-fluoroadenosine-3'-phosphate ((2S,4R)-1-[29-[[2-(acetylamino)-2-deoxy-beta-D-galactopyra nosyl]oxy]-14,14-bis[[3-[[3-[[5-[[2-(acetylamino)-2-deoxy-b eta-D-galactopyranosyl]oxy]-1-oxopentyl]amino]propyl]amino] -3-oxopropoxy]methyl]-1,12,19,25-tetraoxo-16-oxa-13,20,24-t riazanonacos-1-yl]-4-hydroxy-2-pyrrolidinyl)methyl ester
ctggtatttcctagggtacaa

SEQ ID NO: 654 - DNA, 21 bp, synthetic construct
  source 1..21: mol_type = other DNA
  modified_base 1: mod_base = OTHER; note = 2'-O-methylcytidine-3'-phosphorothioate
  modified_base 2: mod_base = OTHER; note = 2'-O-methyluridine-3'-phosphorothioate
  modified_base 3: mod_base = OTHER; note = 2'-O-methylguanosine-3'-phosphate
  modified_base 4: mod_base = OTHER; note = 2'-O-methylguanosine-3'-phosphate
  modified_base 5: mod_base = OTHER; note = 2'-O-methyluridine-3'-phosphate
  modified_base 6: mod_base = OTHER; note = 2'-O-methyladenosine-3'-phosphate
  modified_base 7: mod_base = OTHER; note = 2'-O-methyluridine-3'-phosphate
  modified_base 8: mod_base = OTHER; note = 2'-O-methyluridine-3'-phosphate
  modified_base 9: mod_base = OTHER; note = 2'-O-methyluridine-3'-phosphate
  modified_base 10: mod_base = OTHER; note = 2'-O-methylcytidine-3'-phosphate
  modified_base 12: mod_base = OTHER; note = 2'-O-methyluridine-3'-phosphate
  modified_base 13: mod_base = OTHER; note = 2'-O-methyladenosine-3'-phosphate
  modified_base 14: mod_base = OTHER; note = 2'-O-methylguanosine-3'-phosphate
  modified_base 15: mod_base = OTHER; note = 2'-O-methylguanosine-3'-phosphate
  modified_base 16: mod_base = OTHER; note = 2'-O-methylguanosine-3'-phosphate
  modified_base 17: mod_base = OTHER; note = 2'-O-methyluridine-3'-phosphate
  modified_base 18: mod_base = OTHER; note = 2'-O-methyladenosine-3'-phosphate
  modified_base 19: mod_base = OTHER; note = 2'-O-methylcytidine-3'-phosphate
  modified_base 20: mod_base = OTHER; note = 2'-O-methyladenosine-3'-phosphate
  modified_base 21: mod_base = OTHER; note = 2'-O-methyladenosine-3'-phosphate ((2S,4R)-1-[29-[[2-(acetylamino)-2-deoxy-beta-D-galactopyra nosyl]oxy]-14,14-bis[[3-[[3-[[5-[[2-(acetylamino)-2-deoxy-b eta-D-galactopyranosyl]oxy]-1-oxopentyl]amino]propyl]amino] -3-oxopropoxy]methyl]-1,12,19,25-tetraoxo-16-oxa-13,20,24-t riazanonacos-1-yl]-4-hydroxy-2-pyrrolidinyl)methyl ester
  misc_feature 1..10: note = RNA
  misc_feature 12..21: note = RNA
  misc_feature 11: note = DNA
ctggtatttcctagggtacaa

SEQ ID NO: 655 - DNA, 21 bp, synthetic construct
  source 1..21: mol_type = other DNA
  modified_base 1: mod_base = OTHER; note = 2'-O-methylcytidine-3'-phosphorothioate
  modified_base 2: mod_base = OTHER; note = 2'-O-methyluridine-3'-phosphorothioate
  modified_base 3: mod_base = OTHER; note = 2'-O-methylguanosine-3'-phosphate
  modified_base 4: mod_base = OTHER; note = 2'-O-methylguanosine-3'-phosphate
  modified_base 5: mod_base = OTHER; note = 2'-O-methyluridine-3'-phosphate
  modified_base 6: mod_base = OTHER; note = 2'-deoxy-2'-fluoroadenosine-3'-phosphate
  modified_base 7: mod_base = OTHER; note = 2'-O-methyluridine-3'-phosphate
  modified_base 8: mod_base = OTHER; note = 2'-O-methyluridine-3'-phosphate
  modified_base 9: mod_base = OTHER; note = 2'-O-methyluridine-3'-phosphate
  modified_base 10: mod_base = OTHER; note = 2'-O-methylcytidine-3'-phosphate
  modified_base 11: mod_base = OTHER; note = 2'-deoxy-2'-fluorocytidine-3'-phosphate
  modified_base 12: mod_base = OTHER; note = 2'-O-methyluridine-3'-phosphate
  modified_base 13: mod_base = OTHER; note = 2'-O-methyladenosine-3'-phosphate
  modified_base 14: mod_base = OTHER; note = 2'-O-methylguanosine-3'-phosphate
  modified_base 15: mod_base = OTHER; note = 2'-O-methylguanosine-3'-phosphate
  modified_base 16: mod_base = OTHER; note = 2'-O-methylguanosine-3'-phosphate
  modified_base 17: mod_base = OTHER; note = 2'-O-methyluridine-3'-phosphate
  modified_base 18: mod_base = OTHER; note = 2'-O-methyladenosine-3'-phosphate
  modified_base 20: mod_base = OTHER; note = 2'-O-methyladenosine-3'-phosphate
  modified_base 21: mod_base = OTHER; note = 2'-O-methyladenosine-3'-phosphate ((2S,4R)-1-[29-[[2-(acetylamino)-2-deoxy-beta-D-galactopyra nosyl]oxy]-14,14-bis[[3-[[3-[[5-[[2-(acetylamino)-2-deoxy-b eta-D-galactopyranosyl]oxy]-1-oxopentyl]amino]propyl]amino] -3-oxopropoxy]methyl]-1,12,19,25-tetraoxo-16-oxa-13,20,24-t riazanonacos-1-yl]-4-hydroxy-2-pyrrolidinyl)methyl ester
  misc_feature 1..18: note = RNA
  misc_feature 20..21: note = RNA
  misc_feature 19: note = DNA
ctggtatttcctagggtacaa

SEQ ID NO: 656 - DNA, 21 bp, synthetic construct
  source 1..21: mol_type = other DNA
  modified_base 1: mod_base = OTHER; note = 2'-O-methylcytidine-3'-phosphorothioate
  modified_base 2: mod_base = OTHER; note = 2'-O-methyluridine-3'-phosphorothioate
  modified_base 3: mod_base = OTHER; note = 2'-O-methylguanosine-3'-phosphate
  modified_base 4: mod_base = OTHER; note = 2'-O-methylguanosine-3'-phosphate
  modified_base 5: mod_base = OTHER; note = 2'-O-methyluridine-3'-phosphate
  modified_base 6: mod_base = OTHER; note = 2'-O-methyladenosine-3'-phosphate
  modified_base 7: mod_base = OTHER; note = 2'-O-methyluridine-3'-phosphate
  modified_base 8: mod_base = OTHER; note = 2'-O-methyluridine-3'-phosphate
  modified_base 9: mod_base = OTHER; note = 2'-O-methyluridine-3'-phosphate
  modified_base 10: mod_base = OTHER; note = 2'-O-methylcytidine-3'-phosphate
  modified_base 13: mod_base = OTHER; note = 2'-O-methyladenosine-3'-phosphate
  modified_base 14: mod_base = OTHER; note = 2'-O-methylguanosine-3'-phosphate
  modified_base 15: mod_base = OTHER; note = 2'-O-methylguanosine-3'-phosphate
  modified_base 16: mod_base = OTHER; note = 2'-O-methylguanosine-3'-phosphate
  modified_base 17: mod_base = OTHER; note = 2'-O-methyluridine-3'-phosphate
  modified_base 18: mod_base = OTHER; note = 2'-O-methyladenosine-3'-phosphate
  modified_base 19: mod_base = OTHER; note = 2'-O-methylcytidine-3'-phosphate
  modified_base 20: mod_base = OTHER; note = 2'-O-methyladenosine-3'-phosphate
  modified_base 21: mod_base = OTHER; note = 2'-O-methyladenosine-3'-phosphate ((2S,4R)-1-[29-[[2-(acetylamino)-2-deoxy-beta-D-galactopyra nosyl]oxy]-14,14-bis[[3-[[3-[[5-[[2-(acetylamino)-2-deoxy-b eta-D-galactopyranosyl]oxy]-1-oxopentyl]amino]propyl]amino] -3-oxopropoxy]methyl]-1,12,19,25-tetraoxo-16-oxa-13,20,24-t riazanonacos-1-yl]-4-hydroxy-2-pyrrolidinyl)methyl ester
  misc_feature 1..10: note = RNA
  misc_feature 13..21: note = RNA
  misc_feature 11..12: note = DNA
ctggtatttcctagggtacaa

SEQ ID NO: 657 - RNA, 21 nt, synthetic construct
  source 1..21: mol_type = other RNA
  modified_base 1: mod_base = OTHER; note = 2'-O-methylcytidine-3'-phosphorothioate
  modified_base 2: mod_base = OTHER; note = 2'-O-methyluridine-3'-phosphorothioate
  modified_base 3: mod_base = OTHER; note = 2'-O-methylguanosine-3'-phosphate
  modified_base 4: mod_base = OTHER; note = 2'-O-methylguanosine-3'-phosphate
  modified_base 5: mod_base = OTHER; note = 2'-O-methyluridine-3'-phosphate
  modified_base 6: mod_base = OTHER; note = 2'-deoxy-2'-fluoroadenosine-3'-phosphate
  modified_base 7: mod_base = OTHER; note = 2'-O-methyluridine-3'-phosphate
  modified_base 8: mod_base = OTHER; note = 2'-O-methyluridine-3'-phosphate
  modified_base 9: mod_base = OTHER; note = 2'-O-methyluridine-3'-phosphate
  modified_base 10: mod_base = OTHER; note = 2'-O-methylcytidine-3'-phosphate
  modified_base 11: mod_base = OTHER; note = 2'-deoxy-2'-fluorocytidine-3'-phosphate
  modified_base 12: mod_base = OTHER; note = 2'-O-methyluridine-3'-phosphate
  modified_base 13: mod_base = OTHER; note = 2'-O-methyladenosine-3'-phosphate
  modified_base 14: mod_base = OTHER; note = 2'-O-methylguanosine-3'-phosphate
  modified_base 15: mod_base = OTHER; note = 2'-O-methylguanosine-3'-phosphate
  modified_base 16: mod_base = OTHER; note = 2'-O-methylguanosine-3'-phosphate
  modified_base 17: mod_base = OTHER; note = 2'-O-methyluridine-3'-phosphate
  modified_base 18: mod_base = OTHER; note = 2'-O-methyladenosine-3'-phosphate
  modified_base 19: mod_base = OTHER; note = 2'-O-methylcytidine-3'-phosphate
  modified_base 20: mod_base = OTHER; note = 2'-O-methyladenosine-3'-phosphate
  modified_base 21: mod_base = OTHER; note = 2'-O-methyladenosine-3'-phosphate ((2S,4R)-1-[29-[[2-(acetylamino)-2-deoxy-beta-D-galactopyra nosyl]oxy]-14,14-bis[[3-[[3-[[5-[[2-(acetylamino)-2-deoxy-b eta-D-galactopyranosyl]oxy]-1-oxopentyl]amino]propyl]amino] -3-oxopropoxy]methyl]-1,12,19,25-tetraoxo-16-oxa-13,20,24-t riazanonacos-1-yl]-4-hydroxy-2-pyrrolidinyl)methyl ester
ctggtatttcctagggtacaa

SEQ ID NO: 658 - RNA, 23 nt, synthetic construct
  source 1..23: mol_type = other RNA
  modified_base 1: mod_base = OTHER; note = 2'-O-methyluridine-3'-phosphorothioate 5'phosphate
  modified_base 2: mod_base = OTHER; note = 2'-deoxy-2'-fluorouridine-3'-phosphorothioate
  modified_base 3: mod_base = OTHER; note = 2'-O-methylguanosine-3'-phosphate
  modified_base 4: mod_base = OTHER; note = 2'-deoxy-2'-fluorouridine-3'-phosphate
  modified_base 5: mod_base = OTHER; note = 2'-O-methyladenosine-3'-phosphate
  modified_base 6: mod_base = OTHER; note = 2'-deoxy-2'-fluorocytidine-3'-phosphate
  modified_base 7: mod_base = OTHER; note = 2'-O-methylcytidine-3'-phosphate
  modified_base 8: mod_base = OTHER; note = 2'-deoxy-2'-fluorocytidine-3'-phosphate
  modified_base 9: mod_base = OTHER; note = 2'-O-methyluridine-3'-phosphate
  modified_base 10: mod_base = OTHER; note = 2'-deoxy-2'-fluoroadenosine-3'-phosphate
  modified_base 11: mod_base = OTHER; note = 2'-O-methylguanosine-3'-phosphate
  modified_base 12: mod_base = OTHER; note = 2'-O-methylguanosine-3'-phosphate
  modified_base 13: mod_base = OTHER; note = 2'-O-methyladenosine-3'-phosphate
  modified_base 14: mod_base = OTHER; note = 2'-deoxy-2'-fluoroadenosine-3'-phosphate
  modified_base 15: mod_base = OTHER; note = 2'-O-methyladenosine-3'-phosphate
  modified_base 16: mod_base = OTHER; note = 2'-deoxy-2'-fluorouridine-3'-phosphate
  modified_base 17: mod_base = OTHER; note = 2'-O-methyladenosine-3'-phosphate
  modified_base 18: mod_base = OTHER; note = 2'-deoxy-2'-fluorocytidine-3'-phosphate
  modified_base 19: mod_base = OTHER; note = 2'-O-methylcytidine-3'-phosphate
  modified_base 20: mod_base = OTHER; note = 2'-deoxy-2'-fluoroadenosine-3'-phosphate
  modified_base 21: mod_base = OTHER; note = 2'-O-methylguanosine-3'-phosphorothioate
  modified_base 22: mod_base = OTHER; note = 2'-O-methyladenosine-3'-phosphorothioate
  modified_base 23: mod_base = OTHER; note = 2'-O-methylguanosine
ttgtaccctaggaaataccagag

SEQ ID NO: 659 - RNA, 23 nt, synthetic construct
  source 1..23: mol_type = other RNA
  modified_base 1: mod_base = OTHER; note = 2'-O-methyluridine-3'-phosphorothioate
  modified_base 2: mod_base = OTHER; note = 2'-deoxy-2'-fluorouridine-3'-phosphorothioate
  modified_base 3: mod_base = OTHER; note = 2'-O-methylguanosine-3'-phosphate
  modified_base 4: mod_base = OTHER; note = 2'-O-methyluridine-3'-phosphate
  modified_base 5: mod_base = OTHER; note = 2'-O-methyladenosine-3'-phosphate
  modified_base 6: mod_base = OTHER; note = 2'-deoxy-2'-fluorocytidine-3'-phosphate
  modified_base 7: mod_base = OTHER; note = 2'-O-methylcytidine-3'-phosphate
  modified_base 8: mod_base = OTHER; note = 2'-deoxy-2'-fluorocytidine-3'-phosphate
  modified_base 9: mod_base = OTHER; note = 2'-O-methyluridine-3'-phosphate
  modified_base 10: mod_base = OTHER; note = 2'-deoxy-2'-fluoroadenosine-3'-phosphate
  modified_base 11: mod_base = OTHER; note = 2'-O-methylguanosine-3'-phosphate
  modified_base 12: mod_base = OTHER; note = 2'-O-methylguanosine-3'-phosphate
  modified_base 13: mod_base = OTHER; note = 2'-O-methyladenosine-3'-phosphate
  modified_base 14: mod_base = OTHER; note = 2'-deoxy-2'-fluoroadenosine-3'-phosphate
  modified_base 15: mod_base = OTHER; note = 2'-O-methyladenosine-3'-phosphate
  modified_base 16: mod_base = OTHER; note = 2'-deoxy-2'-fluorouridine-3'-phosphate
  modified_base 17: mod_base = OTHER; note = 2'-O-methyladenosine-3'-phosphate
  modified_base 18: mod_base = OTHER; note = 2'-O-methylcytidine-3'-phosphate
  modified_base 19: mod_base = OTHER; note = 2'-O-methylcytidine-3'-phosphate
  modified_base 20: mod_base = OTHER; note = 2'-O-methyladenosine-3'-phosphate
  modified_base 21: mod_base = OTHER; note = 2'-O-methylguanosine-3'-phosphorothioate
  modified_base 22: mod_base = OTHER; note = 2'-O-methyladenosine-3'-phosphorothioate
  modified_base 23: mod_base = OTHER; note = 2'-O-methylguanosine
ttgtaccctaggaaataccagag

SEQ ID NO: 660 - RNA, 23 nt, synthetic construct
  source 1..23: mol_type = other RNA
  modified_base 1: mod_base = OTHER; note = 2'-O-methyluridine-3'-phosphorothioate
  modified_base 2: mod_base = OTHER; note = 2'-deoxy-2'-fluorouridine-3'-phosphorothioate
  modified_base 3: mod_base = OTHER; note = 2'-O-methylguanosine-3'-phosphate
  modified_base 4: mod_base = OTHER; note = 2'-deoxy-2'-fluorouridine-3'-phosphate
  modified_base 5: mod_base = OTHER; note = 2'-O-methyladenosine-3'-phosphate
  modified_base 6: mod_base = OTHER; note = 2'-deoxy-2'-fluorocytidine-3'-phosphate
  modified_base 7: mod_base = OTHER; note = 2'-O-methylcytidine-3'-phosphate
  modified_base 8: mod_base = OTHER; note = 2'-deoxy-2'-fluorocytidine-3'-phosphate
  modified_base 9: mod_base = OTHER; note = 2'-O-methyluridine-3'-phosphate
  modified_base 10: mod_base = OTHER; note = 2'-deoxy-2'-fluoroadenosine-3'-phosphate
  modified_base 11: mod_base = OTHER; note = 2'-O-methylguanosine-3'-phosphate
  modified_base 12: mod_base = OTHER; note = 2'-O-methylguanosine-3'-phosphate
  modified_base 13: mod_base = OTHER; note = 2'-O-methyladenosine-3'-phosphate
  modified_base 14: mod_base = OTHER; note = 2'-deoxy-2'-fluoroadenosine-3'-phosphate
  modified_base 15: mod_base = OTHER; note = 2'-O-methyladenosine-3'-phosphate
  modified_base 16: mod_base = OTHER; note = 2'-deoxy-2'-fluorouridine-3'-phosphate
  modified_base 17: mod_base = OTHER; note = 2'-O-methyladenosine-3'-phosphate
  modified_base 18: mod_base = OTHER; note = 2'-deoxy-2'-fluorocytidine-3'-phosphate
  modified_base 19: mod_base = OTHER; note = 2'-O-methylcytidine-3'-phosphate
  modified_base 20: mod_base = OTHER; note = 2'-deoxy-2'-fluoroadenosine-3'-phosphate
  modified_base 21: mod_base = OTHER; note = 2'-O-methylguanosine-3'-phosphorothioate
  modified_base 22: mod_base = OTHER; note = 2'-O-methyladenosine-3'-phosphorothioate
  modified_base 23: mod_base = OTHER; note = 2'-O-methylguanosine
ttgtaccctaggaaataccagag

SEQ ID NO: 661 - RNA, 23 nt, synthetic construct
  source 1..23: mol_type = other RNA
  modified_base 1: mod_base = OTHER; note = 2'-O-methyluridine-3'-phosphorothioate 5'phosphate
  modified_base 2: mod_base = OTHER; note = 2'-deoxy-2'-fluorouridine-3'-phosphorothioate
  modified_base 3: mod_base = OTHER; note = 2'-O-methylguanosine-3'-phosphate
  modified_base 4: mod_base = OTHER; note = 2'-deoxy-2'-fluorouridine-3'-phosphate
  modified_base 5: mod_base = OTHER; note = 2'-O-methyladenosine-3'-phosphate
  modified_base 6: mod_base = OTHER; note = 2'-deoxy-2'-fluorocytidine-3'-phosphate
  modified_base 7: mod_base = OTHER; note = 2'-O-methylcytidine-3'-phosphate
  modified_base 8: mod_base = OTHER; note = 2'-deoxy-2'-fluorocytidine-3'-phosphate
  modified_base 9: mod_base = OTHER; note = 2'-O-methyluridine-3'-phosphate
  modified_base 10: mod_base = OTHER; note = 2'-deoxy-2'-fluoroadenosine-3'-phosphate
  modified_base 11: mod_base = OTHER; note = 2'-O-methylguanosine-3'-phosphate
  modified_base 12: mod_base = OTHER; note = 2'-O-methylguanosine-3'-phosphate
  modified_base 13: mod_base = OTHER; note = 2'-O-methyladenosine-3'-phosphate
  modified_base 14: mod_base = OTHER; note = 2'-deoxy-2'-fluoroadenosine-3'-phosphate
  modified_base 15: mod_base = OTHER; note = 2'-O-methyladenosine-3'-phosphate
  modified_base 16: mod_base = OTHER; note = 2'-deoxy-2'-fluorouridine-3'-phosphate
  modified_base 17: mod_base = OTHER; note = 2'-O-methyladenosine-3'-phosphate
  modified_base 18: mod_base = OTHER; note = 2'-deoxy-2'-fluorocytidine-3'-phosphate
  modified_base 19: mod_base = OTHER; note = 2'-O-methylcytidine-3'-phosphate
  modified_base 20: mod_base = OTHER; note = 2'-deoxy-2'-fluoroadenosine-3'-phosphate
  modified_base 21: mod_base = OTHER; note = 2'-O-methylguanosine-3'-phosphorothioate
  modified_base 22: mod_base = OTHER; note = 2'-O-methyladenosine-3'-phosphorothioate
  modified_base 23: mod_base = OTHER; note = 2'-O-methylguanosine
ttgtaccctaggaaataccagag

SEQ ID NO: 662 - RNA, 23 nt, synthetic construct
  source 1..23: mol_type = other RNA
  modified_base 1: mod_base = OTHER; note = 2'-O-methyluridine-3'-phosphorothioate
  modified_base 2: mod_base = OTHER; note = 2'-deoxy-2'-fluorouridine-3'-phosphorothioate
  modified_base 3: mod_base = OTHER; note = 2'-O-methylguanosine-3'-phosphate
  modified_base 4: mod_base = OTHER; note = 2'-deoxy-2'-fluorouridine-3'-phosphate
  modified_base 5: mod_base = OTHER; note = 2'-O-methyladenosine-3'-phosphate
  modified_base 6: mod_base = OTHER; note = 2'-deoxy-2'-fluorocytidine-3'-phosphate
  modified_base 7: mod_base = OTHER; note = 2'-O-methylcytidine-3'-phosphate
  modified_base 8: mod_base = OTHER; note = 2'-deoxy-2'-fluorocytidine-3'-phosphate
  modified_base 9: mod_base = OTHER; note = 2'-O-methyluridine-3'-phosphate
  modified_base 10: mod_base = OTHER; note = 2'-deoxy-2'-fluoroadenosine-3'-phosphate
  modified_base 11: mod_base = OTHER; note = 2'-O-methylguanosine-3'-phosphate
  modified_base 12: mod_base = OTHER; note = 2'-O-methylguanosine-3'-phosphate
  modified_base 13: mod_base = OTHER; note = 2'-O-methyladenosine-3'-phosphate
  modified_base 14: mod_base = OTHER; note = 2'-deoxy-2'-fluoroadenosine-3'-phosphate
  modified_base 15: mod_base = OTHER; note = 2'-O-methyladenosine-3'-phosphate
  modified_base 16: mod_base = OTHER; note = 2'-deoxy-2'-fluorouridine-3'-phosphate
  modified_base 17: mod_base = OTHER; note = 2'-O-methyladenosine-3'-phosphate
  modified_base 18: mod_base = OTHER; note = 2'-deoxy-2'-fluorocytidine-3'-phosphate
  modified_base 19: mod_base = OTHER; note = 2'-O-methylcytidine-3'-phosphate
  modified_base 20: mod_base = OTHER; note = 2'-deoxy-2'-fluoroadenosine-3'-phosphate
  modified_base 21: mod_base = OTHER; note = 2'-O-methylguanosine-3'-phosphorothioate
  modified_base 22: mod_base = OTHER; note = 2'-O-methyladenosine-3'-phosphorothioate
  modified_base 23: mod_base = OTHER; note = 2'-O-methylguanosine
ttgtaccctaggaaataccagag

SEQ ID NO: 663 - RNA, 23 nt, synthetic construct
  source 1..23: mol_type = other RNA
  modified_base 1: mod_base = OTHER; note = 2'-O-methyluridine-3'-phosphorothioate
  modified_base 2: mod_base = OTHER; note = 2'-deoxy-2'-fluorouridine-3'-phosphorothioate
  modified_base 3: mod_base = OTHER; note = 2'-O-methylguanosine-3'-phosphate
  modified_base 4: mod_base = OTHER; note = 2'-deoxy-2'-fluorouridine-3'-phosphate
  modified_base 5: mod_base = OTHER; note = 2'-O-methyladenosine-3'-phosphate
  modified_base 6: mod_base = OTHER; note = 2'-deoxy-2'-fluorocytidine-3'-phosphate
  modified_base 7: mod_base = OTHER; note = 2'-O-methylcytidine-3'-phosphate
  modified_base 8: mod_base = OTHER; note = 2'-O-methylcytidine-3'-phosphate
  modified_base 9: mod_base = OTHER; note = 2'-O-methyluridine-3'-phosphate
  modified_base 10: mod_base = OTHER; note = 2'-deoxy-2'-fluoroadenosine-3'-phosphate
  modified_base 11: mod_base = OTHER; note = 2'-O-methylguanosine-3'-phosphate
  modified_base 12: mod_base = OTHER; note = 2'-O-methylguanosine-3'-phosphate
  modified_base 13: mod_base = OTHER; note = 2'-O-methyladenosine-3'-phosphate
  modified_base 14: mod_base = OTHER; note = 2'-deoxy-2'-fluoroadenosine-3'-phosphate
  modified_base 15: mod_base = OTHER; note = 2'-O-methyladenosine-3'-phosphate
  modified_base 16: mod_base = OTHER; note = 2'-deoxy-2'-fluorouridine-3'-phosphate
  modified_base 17: mod_base = OTHER; note = 2'-O-methyladenosine-3'-phosphate
  modified_base 18: mod_base = OTHER; note = 2'-deoxy-2'-fluorocytidine-3'-phosphate
  modified_base 19: mod_base = OTHER; note = 2'-O-methylcytidine-3'-phosphate
  modified_base 20: mod_base = OTHER; note = 2'-deoxy-2'-fluoroadenosine-3'-phosphate
  modified_base 21: mod_base = OTHER; note = 2'-O-methylguanosine-3'-phosphorothioate
  modified_base 22: mod_base = OTHER; note = 2'-O-methyladenosine-3'-phosphorothioate
  modified_base 23: mod_base = OTHER; note = 2'-O-methylguanosine
ttgtaccctaggaaataccagag

SEQ ID NO: 664 - RNA, 21 nt, synthetic construct
  source 1..21: mol_type = other RNA
  modified_base 1: mod_base = OTHER; note = 2'-O-methyluridine-3'-phosphorothioate 5'phosphate
  modified_base 2: mod_base = OTHER; note = 2'-deoxy-2'-fluorouridine-3'-phosphorothioate
  modified_base 3: mod_base = OTHER; note = 2'-O-methylguanosine-3'-phosphate
  modified_base 4: mod_base = OTHER; note = 2'-deoxy-2'-fluorouridine-3'-phosphate
  modified_base 5: mod_base = OTHER; note = 2'-O-methyladenosine-3'-phosphate
  modified_base 6: mod_base = OTHER; note = 2'-deoxy-2'-fluorocytidine-3'-phosphate
  modified_base 7: mod_base = OTHER; note = 2'-O-methylcytidine-3'-phosphate
  modified_base 8: mod_base = OTHER; note = 2'-deoxy-2'-fluorocytidine-3'-phosphate
  modified_base 9: mod_base = OTHER; note = 2'-O-methyluridine-3'-phosphate
  modified_base 10: mod_base = OTHER; note = 2'-deoxy-2'-fluoroadenosine-3'-phosphate
  modified_base 11: mod_base = OTHER; note = 2'-O-methylguanosine-3'-phosphate
  modified_base 12: mod_base = OTHER; note = 2'-O-methylguanosine-3'-phosphate
  modified_base 13: mod_base = OTHER; note = 2'-O-methyladenosine-3'-phosphate
  modified_base 14: mod_base = OTHER; note = 2'-deoxy-2'-fluoroadenosine-3'-phosphate
  modified_base 15: mod_base = OTHER; note = 2'-O-methyladenosine-3'-phosphate
  modified_base 16: mod_base = OTHER; note = 2'-deoxy-2'-fluorouridine-3'-phosphate
  modified_base 17: mod_base = OTHER; note = 2'-O-methyladenosine-3'-phosphate
  modified_base 18: mod_base = OTHER; note = 2'-deoxy-2'-fluorocytidine-3'-phosphate
  modified_base 19: mod_base = OTHER; note = 2'-O-methylcytidine-3'-phosphorothioate
  modified_base 20: mod_base = OTHER; note = 2'-O-methyladenosine-3'-phosphorothioate
  modified_base 21: mod_base = OTHER; note = 2'-O-methylguanosine
ttgtaccctaggaaataccag

SEQ ID NO: 665 - RNA, 23 nt, synthetic construct
  source 1..23: mol_type = other RNA
  modified_base 1: mod_base = OTHER; note = 2'-O-methyluridine-3'-phosphorothioate
  modified_base 2: mod_base = OTHER; note = 2'-deoxy-2'-fluorouridine-3'-phosphorothioate
  modified_base 3: mod_base = OTHER; note = 2'-O-methylguanosine-3'-phosphate
  modified_base 4: mod_base = OTHER; note = 2'-deoxy-2'-fluorouridine-3'-phosphate
  modified_base 5: mod_base = OTHER; note = 2'-O-methyladenosine-3'-phosphate
  modified_base 6: mod_base = OTHER; note = 2'-deoxy-2'-fluorocytidine-3'-phosphate
  modified_base 7: mod_base = OTHER; note = 2'-O-methylcytidine-3'-phosphate
  modified_base 8: mod_base = OTHER; note = 2'-deoxy-2'-fluorocytidine-3'-phosphate
  modified_base 9: mod_base = OTHER; note = 2'-O-methyluridine-3'-phosphate
  modified_base 10: mod_base = OTHER; note = 2'-deoxy-2'-fluoroadenosine-3'-phosphate
  modified_base 11: mod_base = OTHER; note = 2'-O-methylguanosine-3'-phosphate
  modified_base 12: mod_base = OTHER; note = 2'-O-methylguanosine-3'-phosphate
  modified_base 13: mod_base = OTHER; note = 2'-O-methyladenosine-3'-phosphate
  modified_base 14: mod_base = OTHER; note = 2'-deoxy-2'-fluoroadenosine-3'-phosphate
  modified_base 15: mod_base = OTHER; note = 2'-O-methyladenosine-3'-phosphate
  modified_base 16: mod_base = OTHER; note = 2'-deoxy-2'-fluorouridine-3'-phosphate
  modified_base 17: mod_base = OTHER; note = 2'-O-methyladenosine-3'-phosphate
  modified_base 18: mod_base = OTHER; note = 2'-O-methylcytidine-3'-phosphate
  modified_base 19: mod_base = OTHER; note = 2'-O-methylcytidine-3'-phosphate
  modified_base 20: mod_base = OTHER; note = 2'-O-methyladenosine-3'-phosphate
  modified_base 21: mod_base = OTHER; note = 2'-O-methylguanosine-3'-phosphorothioate
  modified_base 22: mod_base = OTHER; note = 2'-O-methyladenosine-3'-phosphorothioate
  modified_base 23: mod_base = OTHER; note = 2'-O-methylguanosine
ttgtaccctaggaaataccagag

SEQ ID NO: 666 - RNA, 23 nt, synthetic construct
  source 1..23: mol_type = other RNA
  modified_base 1: mod_base = OTHER; note = 2'-O-methyluridine-3'-phosphorothioate
  modified_base 2: mod_base = OTHER; note = 2'-deoxy-2'-fluorouridine-3'-phosphorothioate
  modified_base 3: mod_base = OTHER; note = 2'-O-methylguanosine-3'-phosphate
  modified_base 4: mod_base = OTHER; note = 2'-deoxy-2'-fluorouridine-3'-phosphate
  modified_base 5: mod_base = OTHER; note = 2'-O-methyladenosine-3'-phosphate
  modified_base 6: mod_base = OTHER; note = 2'-O-methylcytidine-3'-phosphate
  modified_base 7: mod_base = OTHER; note = 2'-O-methylcytidine-3'-phosphate
  modified_base 8: mod_base = OTHER; note = 2'-deoxy-2'-fluorocytidine-3'-phosphate
  modified_base 9: mod_base = OTHER; note = 2'-O-methyluridine-3'-phosphate
  modified_base 10: mod_base = OTHER; note = 2'-O-methyladenosine-3'-phosphate
  modified_base 11: mod_base = OTHER; note = 2'-O-methylguanosine-3'-phosphate
  modified_base 12: mod_base = OTHER; note = 2'-O-methylguanosine-3'-phosphate
  modified_base 13: mod_base = OTHER; note = 2'-O-methyladenosine-3'-phosphate
  modified_base 14: mod_base = OTHER; note = 2'-deoxy-2'-fluoroadenosine-3'-phosphate
  modified_base 15: mod_base = OTHER; note = 2'-O-methyladenosine-3'-phosphate
  modified_base 16: mod_base = OTHER; note = 2'-deoxy-2'-fluorouridine-3'-phosphate
  modified_base 17: mod_base = OTHER; note = 2'-O-methyladenosine-3'-phosphate
  modified_base 18: mod_base = OTHER; note = 2'-O-methylcytidine-3'-phosphate
  modified_base 19: mod_base = OTHER; note = 2'-O-methylcytidine-3'-phosphate
  modified_base 20: mod_base = OTHER; note = 2'-deoxy-2'-fluoroadenosine-3'-phosphate
  modified_base 21: mod_base = OTHER; note = 2'-O-methylguanosine-3'-phosphorothioate
  modified_base 22: mod_base = OTHER; note = 2'-O-methyladenosine-3'-phosphorothioate
  modified_base 23: mod_base = OTHER; note = 2'-O-methylguanosine
ttgtaccctaggaaataccagag

SEQ ID NO: 667 - RNA, 23 nt, synthetic construct
  source 1..23: mol_type = other RNA
  modified_base 1: mod_base = OTHER; note = 2'-O-methyluridine-3'-phosphorothioate
  modified_base 2: mod_base = OTHER; note = 2'-deoxy-2'-fluorouridine-3'-phosphorothioate
  modified_base 3: mod_base = OTHER; note = 2'-O-methylguanosine-3'-phosphate
  modified_base 4: mod_base = OTHER; note = 2'-O-methyluridine-3'-phosphate
  modified_base 5: mod_base = OTHER; note = 2'-O-methyladenosine-3'-phosphate
  modified_base 6: mod_base = OTHER; note = 2'-deoxy-2'-fluorocytidine-3'-phosphate
  modified_base 7: mod_base = OTHER; note = 2'-O-methylcytidine-3'-phosphate
  modified_base 8: mod_base = OTHER; note = 2'-O-methylcytidine-3'-phosphate
  modified_base 9: mod_base = OTHER; note = 2'-deoxy-2'-fluorouridine-3'-phosphate
  modified_base 10: mod_base = OTHER; note = 2'-O-methyladenosine-3'-phosphate
  modified_base 11: mod_base = OTHER; note = 2'-O-methylguanosine-3'-phosphate
  modified_base 12: mod_base = OTHER; note = 2'-O-methylguanosine-3'-phosphate
  modified_base 13: mod_base = OTHER; note = 2'-O-methyladenosine-3'-phosphate
  modified_base 14: mod_base = OTHER; note = 2'-deoxy-2'-fluoroadenosine-3'-phosphate
  modified_base 15: mod_base = OTHER; note = 2'-O-methyladenosine-3'-phosphate
  modified_base 16: mod_base = OTHER; note = 2'-deoxy-2'-fluorouridine-3'-phosphate
  modified_base 17: mod_base = OTHER; note = 2'-O-methyladenosine-3'-phosphate
  modified_base 18: mod_base = OTHER; note = 2'-O-methylcytidine-3'-phosphate
  modified_base 19: mod_base = OTHER; note = 2'-O-methylcytidine-3'-phosphate
  modified_base 20: mod_base = OTHER; note = 2'-O-methyladenosine-3'-phosphate
  modified_base 21: mod_base = OTHER; note = 2'-O-methylguanosine-3'-phosphorothioate
  modified_base 22: mod_base = OTHER; note = 2'-O-methyladenosine-3'-phosphorothioate
  modified_base 23: mod_base = OTHER; note = 2'-O-methylguanosine
ttgtaccctaggaaataccagag

SEQ ID NO: 668 - RNA, 23 nt, synthetic construct
  source 1..23: mol_type = other RNA
  modified_base 1: mod_base = OTHER; note = 2'-O-methyluridine-3'-phosphorothioate
  modified_base 2: mod_base = OTHER; note = 2'-deoxy-2'-fluorouridine-3'-phosphorothioate
  modified_base 3: mod_base = OTHER; note = 2'-deoxy-2'-fluoroguanosine-3'-phosphate
  modified_base 4: mod_base = OTHER; note = 2'-O-methyluridine-3'-phosphate
  modified_base 5: mod_base = OTHER; note = 2'-O-methyladenosine-3'-phosphate
  modified_base 6: mod_base = OTHER; note = 2'-deoxy-2'-fluorocytidine-3'-phosphate
  modified_base 7: mod_base = OTHER; note = 2'-O-methylcytidine-3'-phosphate
  modified_base 8: mod_base = OTHER; note = 2'-deoxy-2'-fluorocytidine-3'-phosphate
  modified_base 9: mod_base = OTHER; note = 2'-O-methyluridine-3'-phosphate
  modified_base 10: mod_base = OTHER; note = 2'-deoxy-2'-fluoroadenosine-3'-phosphate
  modified_base 11: mod_base = OTHER; note = 2'-O-methylguanosine-3'-phosphate
  modified_base 12: mod_base = OTHER; note = 2'-O-methylguanosine-3'-phosphate
  modified_base 13: mod_base = OTHER; note = 2'-O-methyladenosine-3'-phosphate
  modified_base 14: mod_base = OTHER; note = 2'-deoxy-2'-fluoroadenosine-3'-phosphate
  modified_base 15: mod_base = OTHER; note = 2'-deoxy-2'-fluoroadenosine-3'-phosphate
  modified_base 16: mod_base = OTHER; note = 2'-O-methyluridine-3'-phosphate
  modified_base 17: mod_base = OTHER; note = 2'-O-methyladenosine-3'-phosphate
  modified_base 18: mod_base = OTHER; note = 2'-deoxy-2'-fluorocytidine-3'-phosphate
  modified_base 19: mod_base = OTHER; note = 2'-O-methylcytidine-3'-phosphate
  modified_base 20: mod_base = OTHER; note = 2'-deoxy-2'-fluoroadenosine-3'-phosphate
  modified_base 21: mod_base = OTHER; note = 2'-O-methylguanosine-3'-phosphorothioate
  modified_base 22: mod_base = OTHER; note = 2'-O-methyladenosine-3'-phosphorothioate
  modified_base 23: mod_base = OTHER; note = 2'-O-methylguanosine
ttgtaccctaggaaataccagag

SEQ ID NO: 669 - RNA, 23 nt, synthetic construct
  source 1..23: mol_type = other RNA
  modified_base 1: mod_base = OTHER; note = 2'-O-methyluridine-3'-phosphorothioate
  modified_base 2: mod_base = OTHER; note = 2'-deoxy-2'-fluorouridine-3'-phosphorothioate
  modified_base 3: mod_base = OTHER; note = 2'-O-methylguanosine-3'-phosphate
  modified_base 4: mod_base = OTHER; note = 2'-deoxy-2'-fluorouridine-3'-phosphate
  modified_base 5: mod_base = OTHER; note = 2'-O-methyladenosine-3'-phosphate
  modified_base 6: mod_base = OTHER; note = 2'-deoxy-2'-fluorocytidine-3'-phosphate
  modified_base 7: mod_base = OTHER; note = 2'-O-methylcytidine-3'-phosphate
  modified_base 8: mod_base = OTHER; note = 2'-deoxy-2'-fluorocytidine-3'-phosphate
  modified_base 9: mod_base = OTHER; note = 2'-O-methyluridine-3'-phosphate
  modified_base 10: mod_base = OTHER; note = 2'-deoxy-2'-fluoroadenosine-3'-phosphate
  modified_base 11: mod_base = OTHER; note = 2'-O-methylguanosine-3'-phosphate
  modified_base 12: mod_base = OTHER; note = 2'-O-methylguanosine-3'-phosphate
  modified_base 13: mod_base = OTHER; note = 2'-O-methyladenosine-3'-phosphate
  modified_base 14: mod_base = OTHER; note = 2'-deoxy-2'-fluoroadenosine-3'-phosphate
  modified_base 15: mod_base = OTHER; note = 2'-O-methyladenosine-3'-phosphate
  modified_base 16: mod_base = OTHER; note = 2'-deoxy-2'-fluorouridine-3'-phosphate
  modified_base 17: mod_base = OTHER; note = 2'-O-methyladenosine-3'-phosphate
  modified_base 18: mod_base = OTHER; note = 2'-deoxy-2'-fluorocytidine-3'-phosphate
  modified_base 19: mod_base = OTHER; note = 2'-O-methylcytidine-3'-phosphate
  modified_base 20: mod_base = OTHER; note = 2'-deoxy-2'-fluoroadenosine-3'-phosphate
  modified_base 21: mod_base = OTHER; note = 2'-O-methylguanosine-3'-phosphorothioate
  modified_base 22: mod_base = OTHER; note = 2'-O-methyladenosine-3'-phosphorothioate
  modified_base 23: mod_base = OTHER; note = 2'-O-methylguanosine
ttgtaccctaggaaataccagag

SEQ ID NO: 670 - RNA, 23 nt, synthetic construct
  source 1..23: mol_type = other RNA
  modified_base 1: mod_base = OTHER; note = 2'-O-methyluridine-3'-phosphorothioate
  modified_base 2: mod_base = OTHER; note = 2'-deoxy-2'-fluorouridine-3'-phosphorothioate
  modified_base 3: mod_base = OTHER; note = 2'-O-methylguanosine-3'-phosphate
  modified_base 4: mod_base = OTHER; note = 2'-O-methyluridine-3'-phosphate
  modified_base 5: mod_base = OTHER; note = 2'-O-methyladenosine-3'-phosphate
  modified_base 6: mod_base = OTHER; note = 2'-deoxy-2'-fluorocytidine-3'-phosphate
  modified_base 7: mod_base = OTHER; note = 2'-O-methylcytidine-3'-phosphate
  modified_base 8: mod_base = OTHER; note = 2'-O-methylcytidine-3'-phosphate
  modified_base 9: mod_base = OTHER; note = 2'-O-methyluridine-3'-phosphate
  modified_base 10: mod_base = OTHER; note = 2'-O-methyladenosine-3'-phosphate
  modified_base 11: mod_base = OTHER; note = 2'-O-methylguanosine-3'-phosphate
  modified_base 12: mod_base = OTHER; note = 2'-O-methylguanosine-3'-phosphate
  modified_base 13: mod_base = OTHER; note = 2'-O-methyladenosine-3'-phosphate
  modified_base 14: mod_base = OTHER; note = 2'-deoxy-2'-fluoroadenosine-3'-phosphate
  modified_base 15: mod_base = OTHER; note = 2'-O-methyladenosine-3'-phosphate
  modified_base 16: mod_base = OTHER; note = 2'-deoxy-2'-fluorouridine-3'-phosphate
  modified_base 17: mod_base = OTHER; note = 2'-O-methyladenosine-3'-phosphate
  modified_base 18: mod_base = OTHER; note = 2'-O-methylcytidine-3'-phosphate
  modified_base 19: mod_base = OTHER; note = 2'-O-methylcytidine-3'-phosphate
  modified_base 20: mod_base = OTHER; note = 2'-O-methyladenosine-3'-phosphate
  modified_base 21: mod_base = OTHER; note = 2'-O-methylguanosine-3'-phosphorothioate
  modified_base 22: mod_base = OTHER; note = 2'-O-methyladenosine-3'-phosphorothioate
  modified_base 23: mod_base = OTHER; note = 2'-O-methylguanosine
ttgtaccctaggaaataccagag

SEQ ID NO: 671 - RNA, 23 nt, synthetic construct
  source 1..23: mol_type = other RNA
  modified_base 1: mod_base = OTHER; note = 2'-O-methyluridine-3'-phosphorothioate
  modified_base 2: mod_base = OTHER; note = 2'-deoxy-2'-fluorouridine-3'-phosphorothioate
  modified_base 3: mod_base = OTHER; note = 2'-deoxy-2'-fluoroguanosine-3'-phosphate
  modified_base 4: mod_base = OTHER; note = 2'-O-methyluridine-3'-phosphate
  modified_base 5: mod_base = OTHER; note = 2'-O-methyladenosine-3'-phosphate
  modified_base 6: mod_base = OTHER; note = 2'-deoxy-2'-fluorocytidine-3'-phosphate
  modified_base 7: mod_base = OTHER; note = 2'-O-methylcytidine-3'-phosphate
  modified_base 8: mod_base = OTHER; note = 2'-deoxy-2'-fluorocytidine-3'-phosphate
  modified_base 9: mod_base = OTHER; note = 2'-O-methyluridine-3'-phosphate
  modified_base 10: mod_base = OTHER; note = 2'-deoxy-2'-fluoroadenosine-3'-phosphate
  modified_base 11: mod_base = OTHER; note = 2'-O-methylguanosine-3'-phosphate
  modified_base 12: mod_base = OTHER; note = 2'-O-methylguanosine-3'-phosphate
  modified_base 13: mod_base = OTHER; note = 2'-O-methyladenosine-3'-phosphate
  modified_base 14: mod_base = OTHER; note = 2'-deoxy-2'-fluoroadenosine-3'-phosphate
  modified_base 15: mod_base = OTHER; note = 2'-O-methyladenosine-3'-phosphate
  modified_base 16: mod_base = OTHER; note = 2'-deoxy-2'-fluorouridine-3'-phosphate
  modified_base 17: mod_base = OTHER; note = 2'-O-methyladenosine-3'-phosphate
  modified_base 18: mod_base = OTHER; note = 2'-deoxy-2'-fluorocytidine-3'-phosphate
  modified_base 19: mod_base = OTHER; note = 2'-O-methylcytidine-3'-phosphate
  modified_base 20: mod_base = OTHER; note = 2'-deoxy-2'-fluoroadenosine-3'-phosphate
  modified_base 21: mod_base = OTHER; note = 2'-O-methylguanosine-3'-phosphorothioate
  modified_base 22: mod_base = OTHER; note = 2'-O-methyladenosine-3'-phosphorothioate
  modified_base 23: mod_base = OTHER; note = 2'-O-methylguanosine
ttgtaccctaggaaataccagag

SEQ ID NO: 672 - RNA, 23 nt, synthetic construct
  source 1..23: mol_type = other RNA
  modified_base 1: mod_base = OTHER; note = 2'-O-methyluridine-3'-phosphorothioate
  modified_base 2: mod_base = OTHER; note = 2'-deoxy-2'-fluorouridine-3'-phosphorothioate
  modified_base 3: mod_base = OTHER; note = 2'-O-methylguanosine-3'-phosphate
  modified_base 4: mod_base = OTHER; note = 2'-deoxy-2'-fluorouridine-3'-phosphate
  modified_base 5: mod_base = OTHER; note = 2'-O-methyladenosine-3'-phosphate
  modified_base 6: mod_base = OTHER; note = 2'-O-methylcytidine-3'-phosphate
  modified_base 7: mod_base = OTHER; note = 2'-O-methylcytidine-3'-phosphate
  modified_base 8: mod_base = OTHER; note = 2'-deoxy-2'-fluorocytidine-3'-phosphate
  modified_base 9: mod_base = OTHER; note = 2'-O-methyluridine-3'-phosphate
  modified_base 10: mod_base = OTHER; note = 2'-deoxy-2'-fluoroadenosine-3'-phosphate
  modified_base 11: mod_base = OTHER; note = 2'-O-methylguanosine-3'-phosphate
  modified_base 12: mod_base = OTHER; note = 2'-O-methylguanosine-3'-phosphate
  modified_base 13: mod_base = OTHER; note = 2'-O-methyladenosine-3'-phosphate
  modified_base 14: mod_base = OTHER; note = 2'-deoxy-2'-fluoroadenosine-3'-phosphate
  modified_base 15: mod_base = OTHER; note = 2'-O-methyladenosine-3'-phosphate
  modified_base 16: mod_base = OTHER; note = 2'-deoxy-2'-fluorouridine-3'-phosphate
  modified_base 17: mod_base = OTHER; note = 2'-O-methyladenosine-3'-phosphate
  modified_base 18: mod_base = OTHER; note = 2'-O-methylcytidine-3'-phosphate
  modified_base 19: mod_base = OTHER; note = 2'-O-methylcytidine-3'-phosphate
  modified_base 20: mod_base = OTHER; note = 2'-deoxy-2'-fluoroadenosine-3'-phosphate
  modified_base 21: mod_base = OTHER; note = 2'-O-methylguanosine-3'-phosphorothioate
  modified_base 22: mod_base = OTHER; note = 2'-O-methyladenosine-3'-phosphorothioate
  modified_base 23: mod_base = OTHER; note = 2'-O-methylguanosine
ttgtaccctaggaaataccagag

SEQ ID NO: 673 - RNA, 23 nt, synthetic construct
  source 1..23: mol_type = other RNA
  modified_base 1: mod_base = OTHER; note = 2'-O-methyluridine-3'-phosphorothioate
  modified_base 2: mod_base = OTHER; note = 2'-deoxy-2'-fluorouridine-3'-phosphorothioate
  modified_base 3: mod_base = OTHER; note = 2'-O-methylguanosine-3'-phosphate
  modified_base 4: mod_base = OTHER; note = 2'-O-methyluridine-3'-phosphate
  modified_base 5: mod_base = OTHER; note = 2'-O-methyladenosine-3'-phosphate
  modified_base 6: mod_base = OTHER; note = 2'-deoxy-2'-fluorocytidine-3'-phosphate
  modified_base 7: mod_base = OTHER; note = 2'-O-methylcytidine-3'-phosphate
  modified_base 8: mod_base = OTHER; note = 2'-O-methylcytidine-3'-phosphate
  modified_base 9: mod_base = OTHER; note = 2'-deoxy-2'-fluorouridine-3'-phosphate
  modified_base 10: mod_base = OTHER; note = 2'-O-methyladenosine-3'-phosphate
  modified_base 11: mod_base = OTHER; note = 2'-O-methylguanosine-3'-phosphate
  modified_base 12: mod_base = OTHER; note = 2'-O-methylguanosine-3'-phosphate
  modified_base 13: mod_base = OTHER; note = 2'-O-methyladenosine-3'-phosphate
  modified_base 14: mod_base = OTHER; note = 2'-deoxy-2'-fluoroadenosine-3'-phosphate
  modified_base 15: mod_base = OTHER; note = 2'-O-methyladenosine-3'-phosphate
  modified_base 16: mod_base = OTHER; note = 2'-deoxy-2'-fluorouridine-3'-phosphate
  modified_base 17: mod_base = OTHER; note = 2'-O-methyladenosine-3'-phosphate
  modified_base 18: mod_base = OTHER; note = 2'-O-methylcytidine-3'-phosphate
  modified_base 19: mod_base = OTHER; note = 2'-O-methylcytidine-3'-phosphate
  modified_base 20: mod_base = OTHER; note = 2'-O-methyladenosine-3'-phosphate
  modified_base 21: mod_base = OTHER; note = 2'-O-methylguanosine-3'-phosphorothioate
  modified_base 22: mod_base = OTHER; note = 2'-O-methyladenosine-3'-phosphorothioate
  modified_base 23: mod_base = OTHER; note = 2'-O-methylguanosine
ttgtaccctaggaaataccagag

SEQ ID NO: 674 - RNA, 23 nt, synthetic construct
  source 1..23: mol_type = other RNA
  modified_base 1: mod_base = OTHER; note = 2'-O-methyluridine-3'-phosphorothioate
  modified_base 2: mod_base = OTHER; note = 2'-deoxy-2'-fluorouridine-3'-phosphorothioate
  modified_base 3: mod_base = OTHER; note = 2'-O-methylguanosine-3'-phosphate
  modified_base 4: mod_base = OTHER; note = 2'-O-methyluridine-3'-phosphate
  modified_base 5: mod_base = OTHER; note = 2'-O-methyladenosine-3'-phosphate
  modified_base 6: mod_base = OTHER; note = 2'-deoxy-2'-fluorocytidine-3'-phosphate
  modified_base 7: mod_base = OTHER; note = 2'-O-methylcytidine-3'-phosphate
  modified_base 8: mod_base = OTHER; note = 2'-deoxy-2'-fluorocytidine-3'-phosphate
  modified_base 9: mod_base = OTHER; note = 2'-deoxy-2'-fluorouridine-3'-phosphate
  modified_base 10: mod_base = OTHER; note = 2'-O-methyladenosine-3'-phosphate
  modified_base 11: mod_base = OTHER; note = 2'-O-methylguanosine-3'-phosphate
  modified_base 12: mod_base = OTHER; note = 2'-O-methylguanosine-3'-phosphate
  modified_base 13: mod_base = OTHER; note = 2'-O-methyladenosine-3'-phosphate
  modified_base 14: mod_base = OTHER; note = 2'-deoxy-2'-fluoroadenosine-3'-phosphate
  modified_base 15: mod_base = OTHER; note = 2'-O-methyladenosine-3'-phosphate
  modified_base 16: mod_base = OTHER; note = 2'-deoxy-2'-fluorouridine-3'-phosphate
  modified_base 17: mod_base = OTHER; note = 2'-O-methyladenosine-3'-phosphate
  modified_base 18: mod_base = OTHER; note = 2'-O-methylcytidine-3'-phosphate
  modified_base 19: mod_base = OTHER; note = 2'-O-methylcytidine-3'-phosphate
  modified_base 20: mod_base = OTHER; note = 2'-O-methyladenosine-3'-phosphate
  modified_base 21: mod_base = OTHER; note = 2'-O-methylguanosine-3'-phosphorothioate
  modified_base 22: mod_base = OTHER; note = 2'-O-methyladenosine-3'-phosphorothioate
  modified_base 23: mod_base = OTHER; note = 2'-O-methylguanosine
ttgtaccctaggaaataccagag

SEQ ID NO: 675 - RNA, 23 nt, synthetic construct
  source 1..23: mol_type = other RNA
  modified_base 1: mod_base = OTHER; note = 2'-O-methyluridine-3'-phosphorothioate
  modified_base 2: mod_base = OTHER; note = 2'-deoxy-2'-fluorouridine-3'-phosphorothioate
  modified_base 3: mod_base = OTHER; note = 2'-deoxy-2'-fluoroguanosine-3'-phosphate
  modified_base 4: mod_base = OTHER; note = 2'-O-methyluridine-3'-phosphate
  modified_base 5: mod_base = OTHER; note = 2'-deoxy-2'-fluoroadenosine-3'-phosphate
  modified_base 6: mod_base = OTHER; note = 2'-deoxy-2'-fluorocytidine-3'-phosphate
  modified_base 7: mod_base = OTHER; note = 2'-O-methylcytidine-3'-phosphate
  modified_base 8: mod_base = OTHER; note = 2'-deoxy-2'-fluorocytidine-3'-phosphate
  modified_base 9: mod_base = OTHER; note = 2'-O-methyluridine-3'-phosphate
  modified_base 10: mod_base = OTHER; note = 2'-deoxy-2'-fluoroadenosine-3'-phosphate
  modified_base 11: mod_base = OTHER; note = 2'-O-methylguanosine-3'-phosphate
  modified_base 12: mod_base = OTHER; note = 2'-O-methylguanosine-3'-phosphate
  modified_base 13: mod_base = OTHER; note = 2'-O-methyladenosine-3'-phosphate
  modified_base 14: mod_base = OTHER; note = 2'-deoxy-2'-fluoroadenosine-3'-phosphate
  modified_base 15: mod_base = OTHER; note = 2'-deoxy-2'-fluoroadenosine-3'-phosphate
  modified_base 16: mod_base = OTHER; note = 2'-O-methyluridine-3'-phosphate
  modified_base 17: mod_base = OTHER; note = 2'-O-methyladenosine-3'-phosphate
  modified_base 18: mod_base = OTHER; note = 2'-deoxy-2'-fluorocytidine-3'-phosphate
  modified_base 19: mod_base = OTHER; note = 2'-O-methylcytidine-3'-phosphate
  modified_base 20: mod_base = OTHER; note = 2'-deoxy-2'-fluoroadenosine-3'-phosphate
  modified_base 21: mod_base = OTHER; note = 2'-O-methylguanosine-3'-phosphorothioate
  modified_base 22: mod_base = OTHER; note = 2'-O-methyladenosine-3'-phosphorothioate
  modified_base 23: mod_base = OTHER; note = 2'-O-methylguanosine
ttgtaccctaggaaataccagag

SEQ ID NO: 676 - RNA, 23 nt, synthetic construct
  source 1..23: mol_type = other RNA
  modified_base 1: mod_base = OTHER; note = 2'-O-methyluridine-3'-phosphorothioate
  modified_base 2: mod_base = OTHER; note = 2'-deoxy-2'-fluorouridine-3'-phosphorothioate
  modified_base 3: mod_base = OTHER; note = 2'-O-methylguanosine-3'-phosphate
  modified_base 4: mod_base = OTHER; note = 2'-deoxy-2'-fluorouridine-3'-phosphate
  modified_base 5: mod_base = OTHER; note = 2'-O-methyladenosine-3'-phosphate
  modified_base 6: mod_base = OTHER; note = 2'-deoxy-2'-fluorocytidine-3'-phosphate
  modified_base 7: mod_base = OTHER; note = 2'-O-methylcytidine-3'-phosphate
  modified_base 8: mod_base = OTHER; note = 2'-deoxy-2'-fluorocytidine-3'-phosphate
  modified_base 9: mod_base = OTHER; note = 2'-O-methyluridine-3'-phosphate
  modified_base 10: mod_base = OTHER; note = 2'-deoxy-2'-fluoroadenosine-3'-phosphate
  modified_base 11: mod_base = OTHER; note = 2'-O-methylguanosine-3'-phosphate
  modified_base 12: mod_base = OTHER; note = 2'-O-methylguanosine-3'-phosphate
  modified_base 13: mod_base = OTHER; note = 2'-O-methyladenosine-3'-phosphate
  modified_base 14: mod_base = OTHER; note = 2'-deoxy-2'-fluoroadenosine-3'-phosphate
  modified_base 15: mod_base = OTHER; note = 2'-O-methyladenosine-3'-phosphate
  modified_base 16: mod_base = OTHER; note = 2'-deoxy-2'-fluorouridine-3'-phosphate
  modified_base 17: mod_base = OTHER; note = 2'-O-methyladenosine-3'-phosphate
  modified_base 18: mod_base = OTHER; note = 2'-deoxy-2'-fluorocytidine-3'-phosphate
  modified_base 19: mod_base = OTHER; note = 2'-O-methylcytidine-3'-phosphate
  modified_base 20: mod_base = OTHER; note = 2'-deoxy-2'-fluoroadenosine-3'-phosphate
  modified_base 21: mod_base = OTHER; note = 2'-O-methylguanosine-3'-phosphorothioate
  modified_base 22: mod_base = OTHER; note = 2'-O-methyladenosine-3'-phosphorothioate
  modified_base 23: mod_base = OTHER; note = 2'-O-methylguanosine
ttgtaccctaggaaataccagag

SEQ ID NO: 677 - RNA, 23 nt, synthetic construct
  source 1..23: mol_type = other RNA
  modified_base 1: mod_base = OTHER; note = 2'-O-methyluridine-3'-phosphorothioate
  modified_base 2: mod_base = OTHER; note = 2'-deoxy-2'-fluorouridine-3'-phosphorothioate
  modified_base 3: mod_base = OTHER; note = 2'-O-methylguanosine-3'-phosphate
  modified_base 4: mod_base = OTHER; note = 2'-deoxy-2'-fluorouridine-3'-phosphate
  modified_base 5: mod_base = OTHER; note = 2'-O-methyladenosine-3'-phosphate
  modified_base 6: mod_base = OTHER; note = 2'-O-methylcytidine-3'-phosphate
  modified_base 7: mod_base = OTHER; note = 2'-O-methylcytidine-3'-phosphate
  modified_base 8: mod_base = OTHER; note = 2'-O-methylcytidine-3'-phosphate
  modified_base 9: mod_base = OTHER; note = 2'-O-methyluridine-3'-phosphate
  modified_base 10: mod_base = OTHER; note = 2'-deoxy-2'-fluoroadenosine-3'-phosphate
  modified_base 11: mod_base = OTHER; note = 2'-O-methylguanosine-3'-phosphate
  modified_base 12: mod_base = OTHER; note = 2'-O-methylguanosine-3'-phosphate
  modified_base 13: mod_base = OTHER; note = 2'-O-methyladenosine-3'-phosphate
  modified_base 14: mod_base = OTHER; note = 2'-deoxy-2'-fluoroadenosine-3'-phosphate
  modified_base 15: mod_base = OTHER; note = 2'-O-methyladenosine-3'-phosphate
  modified_base 16: mod_base = OTHER; note = 2'-deoxy-2'-fluorouridine-3'-phosphate
  modified_base 17: mod_base = OTHER; note = 2'-O-methyladenosine-3'-phosphate
  modified_base 18: mod_base = OTHER; note = 2'-O-methylcytidine-3'-phosphate
  modified_base 19: mod_base = OTHER; note = 2'-O-methylcytidine-3'-phosphate
  modified_base 20: mod_base = OTHER; note = 2'-deoxy-2'-fluoroadenosine-3'-phosphate
  modified_base 21: mod_base = OTHER; note = 2'-O-methylguanosine-3'-phosphorothioate
  modified_base 22: mod_base = OTHER; note = 2'-O-methyladenosine-3'-phosphorothioate
  modified_base 23: mod_base = OTHER; note = 2'-O-methylguanosine
ttgtaccctaggaaataccagag

SEQ ID NO: 678 - RNA, 23 nt, synthetic construct
  source 1..23: mol_type = other RNA
  modified_base 1: mod_base = OTHER; note = 2'-O-methyluridine-3'-phosphorothioate
  modified_base 2: mod_base = OTHER; note = 2'-deoxy-2'-fluorouridine-3'-phosphorothioate
  modified_base 3: mod_base = OTHER; note = 2'-deoxy-2'-fluoroguanosine-3'-phosphate
  modified_base 4: mod_base = OTHER; note = 2'-O-methyluridine-3'-phosphate
  modified_base 5: mod_base = OTHER; note = 2'-O-methyladenosine-3'-phosphate
  modified_base 6: mod_base = OTHER; note = 2'-deoxy-2'-fluorocytidine-3'-phosphate
  modified_base 7: mod_base = OTHER; note = 2'-O-methylcytidine-3'-phosphate
  modified_base 8: mod_base = OTHER; note = 2'-deoxy-2'-fluorocytidine-3'-phosphate
  modified_base 9: mod_base = OTHER; note = 2'-O-methyluridine-3'-phosphate
  modified_base 10: mod_base = OTHER; note = 2'-deoxy-2'-fluoroadenosine-3'-phosphate
  modified_base 11: mod_base = OTHER; note = 2'-O-methylguanosine-3'-phosphate
  modified_base 12: mod_base = OTHER; note = 2'-O-methylguanosine-3'-phosphate
  modified_base 13: mod_base = OTHER; note = 2'-O-methyladenosine-3'-phosphate
  modified_base 14: mod_base = OTHER; note = 2'-deoxy-2'-fluoroadenosine-3'-phosphate
  modified_base 15: mod_base = OTHER; note = 2'-deoxy-2'-fluoroadenosine-3'-phosphate
  modified_base 16: mod_base = OTHER; note = 2'-O-methyluridine-3'-phosphate
  modified_base 17: mod_base = OTHER; note = 2'-deoxy-2'-fluoroadenosine-3'-phosphate
  modified_base 18: mod_base = OTHER; note = 2'-O-methylcytidine-3'-phosphate
  modified_base 19: mod_base = OTHER; note = 2'-O-methylcytidine-3'-phosphate
  modified_base 20: mod_base = OTHER; note = 2'-O-methyladenosine-3'-phosphate
  modified_base 21: mod_base = OTHER; note = 2'-O-methylguanosine-3'-phosphorothioate
  modified_base 22: mod_base = OTHER; note = 2'-O-methyladenosine-3'-phosphorothioate
  modified_base 23: mod_base = OTHER; note = 2'-O-methylguanosine
ttgtaccctaggaaataccagag

SEQ ID NO: 679 - RNA, 23 nt, synthetic construct
  source 1..23: mol_type = other RNA
  modified_base 1: mod_base = OTHER; note = 2'-O-methyluridine-3'-phosphorothioate
  modified_base 2: mod_base = OTHER; note = 2'-deoxy-2'-fluorouridine-3'-phosphorothioate
  modified_base 3: mod_base = OTHER; note = 2'-O-methylguanosine-3'-phosphate
  modified_base 4: mod_base = OTHER; note = 2'-deoxy-2'-fluorouridine-3'-phosphate
  modified_base 5: mod_base = OTHER; note = 2'-O-methyladenosine-3'-phosphate
  modified_base 6: mod_base = OTHER; note = 2'-deoxy-2'-fluorocytidine-3'-phosphate
  modified_base 7: mod_base = OTHER; note = 2'-O-methylcytidine-3'-phosphate
  modified_base 8: mod_base = OTHER; note = 2'-deoxy-2'-fluorocytidine-3'-phosphate
  modified_base 9: mod_base = OTHER; note = 2'-O-methyluridine-3'-phosphate
  modified_base 10: mod_base = OTHER; note = 2'-deoxy-2'-fluoroadenosine-3'-phosphate
  modified_base 11: mod_base = OTHER; note = 2'-O-methylguanosine-3'-phosphate
  modified_base 12: mod_base = OTHER; note = 2'-O-methylguanosine-3'-phosphate
  modified_base 13: mod_base = OTHER; note = 2'-O-methyladenosine-3'-phosphate
  modified_base 14: mod_base = OTHER; note = 2'-deoxy-2'-fluoroadenosine-3'-phosphate
  modified_base 15: mod_base = OTHER; note = 2'-O-methyladenosine-3'-phosphate
  modified_base 16: mod_base = OTHER; note = 2'-deoxy-2'-fluorouridine-3'-phosphate
  modified_base 17: mod_base = OTHER; note = 2'-O-methyladenosine-3'-phosphate
  modified_base 18: mod_base = OTHER; note = 2'-deoxy-2'-fluorocytidine-3'-phosphate
  modified_base 19: mod_base = OTHER; note = 2'-O-methylcytidine-3'-phosphate
  modified_base 20: mod_base = OTHER; note = 2'-deoxy-2'-fluoroadenosine-3'-phosphate
  modified_base 21: mod_base = OTHER; note = 2'-O-methylguanosine-3'-phosphorothioate
  modified_base 22: mod_base = OTHER; note = 2'-O-methyladenosine-3'-phosphorothioate
  modified_base 23: mod_base = OTHER; note = 2'-O-methylguanosine
ttgtaccctaggaaataccagag

SEQ ID NO: 680 - RNA, 23 nt, synthetic construct
  source 1..23: mol_type = other RNA
  modified_base 1: mod_base = OTHER; note = 2'-O-methyluridine-3'-phosphorothioate
  modified_base 2: mod_base = OTHER; note = 2'-deoxy-2'-fluorouridine-3'-phosphorothioate
  modified_base 3: mod_base = OTHER; note = 2'-deoxy-2'-fluoroguanosine-3'-phosphate
  modified_base 4: mod_base = OTHER; note = 2'-O-methyluridine-3'-phosphate
  modified_base 5: mod_base = OTHER; note = 2'-deoxy-2'-fluoroadenosine-3'-phosphate
  modified_base 6: mod_base = OTHER; note = 2'-deoxy-2'-fluorocytidine-3'-phosphate
  modified_base 7: mod_base = OTHER; note = 2'-O-methylcytidine-3'-phosphate
  modified_base 8: mod_base = OTHER; note = 2'-deoxy-2'-fluorocytidine-3'-phosphate
  modified_base 9: mod_base = OTHER; note = 2'-O-methyluridine-3'-phosphate
  modified_base 10: mod_base = OTHER; note = 2'-deoxy-2'-fluoroadenosine-3'-phosphate
  modified_base 11: mod_base = OTHER; note = 2'-O-methylguanosine-3'-phosphate
  modified_base 12: mod_base = OTHER; note = 2'-O-methylguanosine-3'-phosphate
  modified_base 13: mod_base = OTHER; note = 2'-O-methyladenosine-3'-phosphate
  modified_base 14: mod_base = OTHER; note = 2'-deoxy-2'-fluoroadenosine-3'-phosphate
  modified_base 15: mod_base = OTHER; note = 2'-deoxy-2'-fluoroadenosine-3'-phosphate
  modified_base 16: mod_base = OTHER; note = 2'-O-methyluridine-3'-phosphate
  modified_base 17: mod_base = OTHER; note = 2'-deoxy-2'-fluoroadenosine-3'-phosphate
  modified_base 18: mod_base = OTHER; note = 2'-deoxy-2'-fluorocytidine-3'-phosphate
  modified_base 19: mod_base = OTHER; note = 2'-O-methylcytidine-3'-phosphate
  modified_base 20: mod_base = OTHER; note = 2'-deoxy-2'-fluoroadenosine-3'-phosphate
  modified_base 21: mod_base = OTHER; note = 2'-O-methylguanosine-3'-phosphorothioate
  modified_base 22: mod_base = OTHER; note = 2'-O-methyladenosine-3'-phosphorothioate
  modified_base 23: mod_base = OTHER; note = 2'-O-methylguanosine
ttgtaccctaggaaataccagag

SEQ ID NO: 681 - RNA, 23 nt, synthetic construct
  source 1..23: mol_type = other RNA
  modified_base 1: mod_base = OTHER; note = 2'-O-methyluridine-3'-phosphorothioate
  modified_base 2: mod_base = OTHER; note = 2'-deoxy-2'-fluorouridine-3'-phosphorothioate
  modified_base 3: mod_base = OTHER; note = 2'-O-methylguanosine-3'-phosphate
  modified_base 4: mod_base = OTHER; note = 2'-deoxy-2'-fluorouridine-3'-phosphate
  modified_base 5: mod_base = OTHER; note = 2'-O-methyladenosine-3'-phosphate
  modified_base 6: mod_base = OTHER; note = 2'-O-methylcytidine-3'-phosphate
  modified_base 7: mod_base = OTHER; note = 2'-O-methylcytidine-3'-phosphate
  modified_base 8: mod_base = OTHER; note = 2'-deoxy-2'-fluorocytidine-3'-phosphate
  modified_base 9: mod_base = OTHER; note = 2'-O-methyluridine-3'-phosphate
  modified_base 10: mod_base = OTHER; note = 2'-deoxy-2'-fluoroadenosine-3'-phosphate
  modified_base 11: mod_base = OTHER; note = 2'-O-methylguanosine-3'-phosphate
  modified_base 12: mod_base = OTHER; note = 2'-O-methylguanosine-3'-phosphate
  modified_base 13: mod_base = OTHER; note = 2'-O-methyladenosine-3'-phosphate
  modified_base 14: mod_base = OTHER; note = 2'-deoxy-2'-fluoroadenosine-3'-phosphate
  modified_base 15: mod_base = OTHER; note = 2'-O-methyladenosine-3'-phosphate
  modified_base 16: mod_base = OTHER; note = 2'-deoxy-2'-fluorouridine-3'-phosphate
  modified_base 17: mod_base = OTHER; note = 2'-O-methyladenosine-3'-phosphate
  modified_base 18: mod_base = OTHER; note = 2'-deoxy-2'-fluorocytidine-3'-phosphate
  modified_base 19: mod_base = OTHER; note = 2'-O-methylcytidine-3'-phosphate
  modified_base 20: mod_base = OTHER; note = 2'-deoxy-2'-fluoroadenosine-3'-phosphate
  modified_base 21: mod_base = OTHER; note = 2'-O-methylguanosine-3'-phosphorothioate
  modified_base 22: mod_base = OTHER; note = 2'-O-methyladenosine-3'-phosphorothioate
  modified_base 23: mod_base = OTHER; note = 2'-O-methylguanosine
ttgtaccctaggaaataccagag

SEQ ID NO: 682 - RNA, 23 nt, synthetic construct
  source 1..23: mol_type = other RNA
  modified_base 1: mod_base = OTHER; note = 2'-O-methyluridine-3'-phosphorothioate 5'phosphate
  modified_base 2: mod_base = OTHER; note = 2'-deoxy-2'-fluorouridine-3'-phosphorothioate
  modified_base 3: mod_base = OTHER; note = 2'-O-methylguanosine-3'-phosphate
  modified_base 4: mod_base = OTHER; note = 2'-deoxy-2'-fluorouridine-3'-phosphate
  modified_base 5: mod_base = OTHER; note = 2'-O-methyladenosine-3'-phosphate
  modified_base 6: mod_base = OTHER; note = 2'-deoxy-2'-fluorocytidine-3'-phosphate
  modified_base 7: mod_base = OTHER; note = 2'-O-methylcytidine-3'-phosphate
  modified_base 8: mod_base = OTHER; note = 2'-deoxy-2'-fluorocytidine-3'-phosphate
  modified_base 9: mod_base = OTHER; note = 2'-O-methyluridine-3'-phosphate
  modified_base 10: mod_base = OTHER; note = 2'-deoxy-2'-fluoroadenosine-3'-phosphate
  modified_base 11: mod_base = OTHER; note = 2'-O-methylguanosine-3'-phosphate
  modified_base 12: mod_base = OTHER; note = 2'-O-methylguanosine-3'-phosphate
  modified_base 13: mod_base = OTHER; note = 2'-O-methyladenosine-3'-phosphate
  modified_base 14: mod_base = OTHER; note = 2'-deoxy-2'-fluoroadenosine-3'-phosphate
  modified_base 15: mod_base = OTHER; note = 2'-O-methyladenosine-3'-phosphate
  modified_base 16: mod_base = OTHER; note = 2'-deoxy-2'-fluorouridine-3'-phosphate
  modified_base 17: mod_base = OTHER; note = 2'-O-methyladenosine-3'-phosphate
  modified_base 18: mod_base = OTHER; note = 2'-deoxy-2'-fluorocytidine-3'-phosphate
  modified_base 19: mod_base = OTHER; note = 2'-O-methylcytidine-3'-phosphate
  modified_base 20: mod_base = OTHER; note = 2'-deoxy-2'-fluoroadenosine-3'-phosphate
  modified_base 21: mod_base = OTHER; note = 2'-O-methylguanosine-3'-phosphorothioate
  modified_base 22: mod_base = OTHER; note = 2'-O-methyladenosine-3'-phosphorothioate
  modified_base 23: mod_base = OTHER; note = 2'-O-methylguanosine
ttgtaccctaggaaataccagag

SEQ ID NO: 683 - RNA, 23 nt, synthetic construct
  source 1..23: mol_type = other RNA
  modified_base 1: mod_base = OTHER; note = 2'-O-methyluridine-3'-phosphorothioate
  modified_base 2: mod_base = OTHER; note = 2'-deoxy-2'-fluorouridine-3'-phosphorothioate
  modified_base 3: mod_base = OTHER; note = 2'-deoxy-2'-fluoroguanosine-3'-phosphate
  modified_base 4: mod_base = OTHER; note = 2'-O-methyluridine-3'-phosphate
  modified_base 5: mod_base = OTHER; note = 2'-deoxy-2'-fluoroadenosine-3'-phosphate
  modified_base 6: mod_base = OTHER; note = 2'-deoxy-2'-fluorocytidine-3'-phosphate
  modified_base 7: mod_base = OTHER; note = 2'-O-methylcytidine-3'-phosphate
  modified_base 8: mod_base = OTHER; note = 2'-deoxy-2'-fluorocytidine-3'-phosphate
  modified_base 9: mod_base = OTHER; note = 2'-O-methyluridine-3'-phosphate
  modified_base 10: mod_base = OTHER; note = 2'-deoxy-2'-fluoroadenosine-3'-phosphate
  modified_base 11: mod_base = OTHER; note = 2'-O-methylguanosine-3'-phosphate
  modified_base 12: mod_base = OTHER; note = 2'-O-methylguanosine-3'-phosphate
  modified_base 13: mod_base = OTHER; note = 2'-O-methyladenosine-3'-phosphate
  modified_base 14: mod_base = OTHER; note = 2'-deoxy-2'-fluoroadenosine-3'-phosphate
  modified_base 15: mod_base = OTHER; note = 2'-O-methyladenosine-3'-phosphate
  modified_base 16: mod_base = OTHER; note = 2'-deoxy-2'-fluorouridine-3'-phosphate
  modified_base 17: mod_base = OTHER; note = 2'-O-methyladenosine-3'-phosphate
  modified_base 18: mod_base = OTHER; note = 2'-deoxy-2'-fluorocytidine-3'-phosphate
  modified_base 19: mod_base = OTHER; note = 2'-O-methylcytidine-3'-phosphate
  modified_base 20: mod_base = OTHER; note = 2'-deoxy-2'-fluoroadenosine-3'-phosphate
  modified_base 21: mod_base = OTHER; note = 2'-O-methylguanosine-3'-phosphorothioate
  modified_base 22: mod_base = OTHER; note = 2'-O-methyladenosine-3'-phosphorothioate
  modified_base 23: mod_base = OTHER; note = 2'-O-methylguanosine
ttgtaccctaggaaataccagag

SEQ ID NO: 684 - RNA, 23 nt, synthetic construct
  source 1..23: mol_type = other RNA
  modified_base 1: mod_base = OTHER; note = 2'-O-methyluridine-3'-phosphorothioate
  modified_base 2: mod_base = OTHER; note = 2'-deoxy-2'-fluorouridine-3'-phosphorothioate
  modified_base 3: mod_base = OTHER; note = 2'-deoxy-2'-fluoroguanosine-3'-phosphate
  modified_base 4: mod_base = OTHER; note = 2'-O-methyluridine-3'-phosphate
  modified_base 5: mod_base = OTHER; note = 2'-O-methyladenosine-3'-phosphate
  modified_base 6: mod_base = OTHER; note = 2'-deoxy-2'-fluorocytidine-3'-phosphate
  modified_base 7: mod_base = OTHER; note = 2'-O-methylcytidine-3'-phosphate
  modified_base 8: mod_base = OTHER; note = 2'-deoxy-2'-fluorocytidine-3'-phosphate
  modified_base 9: mod_base = OTHER; note = 2'-O-methyluridine-3'-phosphate
  modified_base 10: mod_base = OTHER; note = 2'-deoxy-2'-fluoroadenosine-3'-phosphate
  modified_base 11: mod_base = OTHER; note = 2'-O-methylguanosine-3'-phosphate
  modified_base 12: mod_base = OTHER; note = 2'-O-methylguanosine-3'-phosphate
  modified_base 13: mod_base = OTHER; note = 2'-O-methyladenosine-3'-phosphate
  modified_base 14: mod_base = OTHER; note = 2'-deoxy-2'-fluoroadenosine-3'-phosphate
  modified_base 15: mod_base = OTHER; note = 2'-deoxy-2'-fluoroadenosine-3'-phosphate
  modified_base 16: mod_base = OTHER; note = 2'-O-methyluridine-3'-phosphate
  modified_base 17: mod_base = OTHER; note = 2'-deoxy-2'-fluoroadenosine-3'-phosphate
  modified_base 18: mod_base = OTHER; note = 2'-O-methylcytidine-3'-phosphate
  modified_base 19: mod_base = OTHER; note = 2'-O-methylcytidine-3'-phosphate
  modified_base 20: mod_base = OTHER; note = 2'-deoxy-2'-fluoroadenosine-3'-phosphate
  modified_base 21: mod_base = OTHER; note = 2'-O-methylguanosine-3'-phosphorothioate
  modified_base 22: mod_base = OTHER; note = 2'-O-methyladenosine-3'-phosphorothioate
  modified_base 23: mod_base = OTHER; note = 2'-O-methylguanosine
ttgtaccctaggaaataccagag

SEQ ID NO: 685 - RNA, 23 nt, synthetic construct
  source 1..23: mol_type = other RNA
  modified_base 1: mod_base = OTHER; note = 2'-O-methyluridine-3'-phosphorothioate
  modified_base 2: mod_base = OTHER; note = 2'-deoxy-2'-fluorouridine-3'-phosphorothioate
  modified_base 3: mod_base = OTHER; note = 2'-O-methylguanosine-3'-phosphate
  modified_base 4: mod_base = OTHER; note = 2'-deoxy-2'-fluorouridine-3'-phosphate
  modified_base 5: mod_base = OTHER; note = 2'-O-methyladenosine-3'-phosphate
  modified_base 6: mod_base = OTHER; note = 2'-deoxy-2'-fluorocytidine-3'-phosphate
  modified_base 7: mod_base = OTHER; note = 2'-O-methylcytidine-3'-phosphate
  modified_base 8: mod_base = OTHER; note = 2'-deoxy-2'-fluorocytidine-3'-phosphate
  modified_base 9: mod_base = OTHER; note = 2'-O-methyluridine-3'-phosphate
  modified_base 10: mod_base = OTHER; note = 2'-deoxy-2'-fluoroadenosine-3'-phosphate
  modified_base 11: mod_base = OTHER; note = 2'-O-methylguanosine-3'-phosphate
  modified_base 12: mod_base = OTHER; note = 2'-O-methylguanosine-3'-phosphate
  modified_base 13: mod_base = OTHER; note = 2'-O-methyladenosine-3'-phosphate
  modified_base 14: mod_base = OTHER; note = 2'-deoxy-2'-fluoroadenosine-3'-phosphate
  modified_base 15: mod_base = OTHER; note = 2'-O-methyladenosine-3'-phosphate
  modified_base 16: mod_base = OTHER; note = 2'-deoxy-2'-fluorouridine-3'-phosphate
  modified_base 17: mod_base = OTHER; note = 2'-O-methyladenosine-3'-phosphate
  modified_base 18: mod_base = OTHER; note = 2'-deoxy-2'-fluorocytidine-3'-phosphate
  modified_base 19: mod_base = OTHER; note = 2'-O-methylcytidine-3'-phosphate
  modified_base 20: mod_base = OTHER; note = 2'-deoxy-2'-fluoroadenosine-3'-phosphate
  modified_base 21: mod_base = OTHER; note = 2'-O-methylguanosine-3'-phosphorothioate
  modified_base 22: mod_base = OTHER; note = 2'-O-methyladenosine-3'-phosphorothioate
  modified_base 23: mod_base = OTHER; note = 2'-O-methylguanosine
ttgtaccctaggaaataccagag

SEQ ID NO: 686 - RNA, 23 nt, synthetic construct
  source 1..23: mol_type = other RNA
  modified_base 1: mod_base = OTHER; note = 2'-O-methyluridine-3'-phosphorothioate
  modified_base 2: mod_base = OTHER; note = 2'-deoxy-2'-fluorouridine-3'-phosphorothioate
  modified_base 3: mod_base = OTHER; note = 2'-O-methylguanosine-3'-phosphate
  modified_base 4: mod_base = OTHER; note = 2'-O-methyluridine-3'-phosphate
  modified_base 5: mod_base = OTHER; note = 2'-O-methyladenosine-3'-phosphate
  modified_base 6: mod_base = OTHER; note = 2'-deoxy-2'-fluorocytidine-3'-phosphate
  modified_base 7: mod_base = OTHER; note = 2'-O-methylcytidine-3'-phosphate
  modified_base 8: mod_base = OTHER; note = 2'-deoxy-2'-fluorocytidine-3'-phosphate
  modified_base 9: mod_base = OTHER; note = 2'-O-methyluridine-3'-phosphate
  modified_base 10: mod_base = OTHER; note = 2'-deoxy-2'-fluoroadenosine-3'-phosphate
  modified_base 11: mod_base = OTHER; note = 2'-O-methylguanosine-3'-phosphate
  modified_base 12: mod_base = OTHER; note = 2'-O-methylguanosine-3'-phosphate
  modified_base 13: mod_base = OTHER; note = 2'-O-methyladenosine-3'-phosphate
  modified_base 14: mod_base = OTHER; note = 2'-deoxy-2'-fluoroadenosine-3'-phosphate
  modified_base 15: mod_base = OTHER; note = 2'-O-methyladenosine-3'-phosphate
  modified_base 16: mod_base = OTHER; note = 2'-deoxy-2'-fluorouridine-3'-phosphate
  modified_base 17: mod_base = OTHER; note = 2'-O-methyladenosine-3'-phosphate
  modified_base 18: mod_base = OTHER; note = 2'-O-methylcytidine-3'-phosphate
  modified_base 19: mod_base = OTHER; note = 2'-O-methylcytidine-3'-phosphate
  modified_base 20: mod_base = OTHER; note = 2'-deoxy-2'-fluoroadenosine-3'-phosphate
  modified_base 21: mod_base = OTHER; note = 2'-O-methylguanosine-3'-phosphorothioate
  modified_base 22: mod_base = OTHER; note = 2'-O-methyladenosine-3'-phosphorothioate
  modified_base 23: mod_base = OTHER; note = 2'-O-methylguanosine
ttgtaccctaggaaataccagag

SEQ ID NO: 687 - RNA, 23 nt, synthetic construct
  source 1..23: mol_type = other RNA
  modified_base 1: mod_base = OTHER; note = 2'-O-methyluridine-3'-phosphorothioate
  modified_base 2: mod_base = OTHER; note = 2'-deoxy-2'-fluorouridine-3'-phosphorothioate
  modified_base 3: mod_base = OTHER; note = 2'-O-methylguanosine-3'-phosphate
  modified_base 4: mod_base = OTHER; note = 2'-deoxy-2'-fluorouridine-3'-phosphate
  modified_base 5: mod_base = OTHER; note = 2'-O-methyladenosine-3'-phosphate
  modified_base 6: mod_base = OTHER; note = 2'-deoxy-2'-fluorocytidine-3'-phosphate
  modified_base 7: mod_base = OTHER; note = 2'-O-methylcytidine-3'-phosphate
  modified_base 8: mod_base = OTHER; note = 2'-deoxy-2'-fluorocytidine-3'-phosphate
  modified_base 9: mod_base = OTHER; note = 2'-O-methyluridine-3'-phosphate
  modified_base 10: mod_base = OTHER; note = 2'-deoxy-2'-fluoroadenosine-3'-phosphate
  modified_base 11: mod_base = OTHER; note = 2'-O-methylguanosine-3'-phosphate
  modified_base 12: mod_base = OTHER; note = 2'-O-methylguanosine-3'-phosphate
  modified_base 13: mod_base = OTHER; note = 2'-O-methyladenosine-3'-phosphate
  modified_base 14: mod_base = OTHER; note = 2'-deoxy-2'-fluoroadenosine-3'-phosphate
  modified_base 15: mod_base = OTHER; note = 2'-O-methyladenosine-3'-phosphate
  modified_base 16: mod_base = OTHER; note = 2'-deoxy-2'-fluorouridine-3'-phosphate
  modified_base 17: mod_base = OTHER; note = 2'-O-methyladenosine-3'-phosphate
  modified_base 18: mod_base = OTHER; note = 2'-deoxy-2'-fluorocytidine-3'-phosphate
  modified_base 19: mod_base = OTHER; note = 2'-O-methylcytidine-3'-phosphate
  modified_base 20: mod_base = OTHER; note = 2'-deoxy-2'-fluoroadenosine-3'-phosphate
  modified_base 21: mod_base = OTHER; note = 2'-O-methylguanosine-3'-phosphorothioate
  modified_base 22: mod_base = OTHER; note = 2'-O-methyladenosine-3'-phosphorothioate
  modified_base 23: mod_base = OTHER; note = 2'-O-methylguanosine
ttgtaccctaggaaataccagag

SEQ ID NO: 688 - RNA, 23 nt, synthetic construct
  source 1..23: mol_type = other RNA
  modified_base 1: mod_base = OTHER; note = 2'-O-methyluridine-3'-phosphorothioate
  modified_base 2: mod_base = OTHER; note = 2'-deoxy-2'-fluorouridine-3'-phosphorothioate
  modified_base 3: mod_base = OTHER; note = 2'-O-methylguanosine-3'-phosphate
  modified_base 4: mod_base = OTHER; note = 2'-O-methyluridine-3'-phosphate
  modified_base 5: mod_base = OTHER; note = 2'-O-methyladenosine-3'-phosphate
  modified_base 6: mod_base = OTHER; note = 2'-deoxy-2'-fluorocytidine-3'-phosphate
  modified_base 7: mod_base = OTHER; note = 2'-O-methylcytidine-3'-phosphate
  modified_base 8: mod_base = OTHER; note = 2'-O-methylcytidine-3'-phosphate
  modified_base 9: mod_base = OTHER; note = 2'-deoxy-2'-fluorouridine-3'-phosphate
  modified_base 10: mod_base = OTHER; note = 2'-O-methyladenosine-3'-phosphate
  modified_base 11: mod_base = OTHER; note = 2'-O-methylguanosine-3'-phosphate
  modified_base 12: mod_base = OTHER; note = 2'-O-methylguanosine-3'-phosphate
  modified_base 13: mod_base = OTHER; note = 2'-O-methyladenosine-3'-phosphate
  modified_base 14: mod_base = OTHER; note = 2'-deoxy-2'-fluoroadenosine-3'-phosphate
  modified_base 15: mod_base = OTHER; note = 2'-O-methyladenosine-3'-phosphate
  modified_base 16: mod_base = OTHER; note = 2'-deoxy-2'-fluorouridine-3'-phosphate
  modified_base 17: mod_base = OTHER; note = 2'-O-methyladenosine-3'-phosphate
  modified_base 18: mod_base = OTHER; note = 2'-O-methylcytidine-3'-phosphate
  modified_base 19: mod_base = OTHER; note = 2'-O-methylcytidine-3'-phosphate
  modified_base 20: mod_base = OTHER; note = 2'-O-methyladenosine-3'-phosphate
  modified_base 21: mod_base = OTHER; note = 2'-O-methylguanosine-3'-phosphorothioate
  modified_base 22: mod_base = OTHER; note = 2'-O-methyladenosine-3'-phosphorothioate
  modified_base 23: mod_base = OTHER; note = 2'-O-methylguanosine
ttgtaccctaggaaataccagag

SEQ ID NO: 689 - RNA, 23 nt, synthetic construct
  source 1..23: mol_type = other RNA
  modified_base 1: mod_base = OTHER; note = 2'-O-methyluridine-3'-phosphorothioate
  modified_base 2: mod_base = OTHER; note = 2'-deoxy-2'-fluorouridine-3'-phosphorothioate
  modified_base 3: mod_base = OTHER; note = 2'-deoxy-2'-fluoroguanosine-3'-phosphate
  modified_base 4: mod_base = OTHER; note = 2'-O-methyluridine-3'-phosphate
  modified_base 5: mod_base = OTHER; note = 2'-O-methyladenosine-3'-phosphate
  modified_base 6: mod_base = OTHER; note = 2'-deoxy-2'-fluorocytidine-3'-phosphate
  modified_base 7: mod_base = OTHER; note = 2'-O-methylcytidine-3'-phosphate
  modified_base 8: mod_base = OTHER; note = 2'-deoxy-2'-fluorocytidine-3'-phosphate
  modified_base 9: mod_base = OTHER; note = 2'-O-methyluridine-3'-phosphate
  modified_base 10: mod_base = OTHER; note = 2'-deoxy-2'-fluoroadenosine-3'-phosphate
  modified_base 11: mod_base = OTHER; note = 2'-O-methylguanosine-3'-phosphate
  modified_base 12: mod_base = OTHER; note = 2'-O-methylguanosine-3'-phosphate
  modified_base 13: mod_base = OTHER; note = 2'-O-methyladenosine-3'-phosphate
  modified_base 14: mod_base = OTHER; note = 2'-deoxy-2'-fluoroadenosine-3'-phosphate
  modified_base 15: mod_base = OTHER; note = 2'-deoxy-2'-fluoroadenosine-3'-phosphate
  modified_base 16: mod_base = OTHER; note = 2'-O-methyluridine-3'-phosphate
  modified_base 17: mod_base = OTHER; note = 2'-deoxy-2'-fluoroadenosine-3'-phosphate
  modified_base 18: mod_base = OTHER; note = 2'-deoxy-2'-fluorocytidine-3'-phosphate
  modified_base 19: mod_base = OTHER; note = 2'-O-methylcytidine-3'-phosphate
  modified_base 20: mod_base = OTHER; note = 2'-O-methyladenosine-3'-phosphate
  modified_base 21: mod_base = OTHER; note = 2'-O-methylguanosine-3'-phosphorothioate
  modified_base 22: mod_base = OTHER; note = 2'-O-methyladenosine-3'-phosphorothioate
  modified_base 23: mod_base = OTHER; note = 2'-O-methylguanosine
ttgtaccctaggaaataccagag

SEQ ID NO: 690 - RNA, 23 nt, synthetic construct
  source 1..23: mol_type = other RNA
  modified_base 1: mod_base = OTHER; note = 2'-O-methyluridine-3'-phosphorothioate
  modified_base 2: mod_base = OTHER; note = 2'-deoxy-2'-fluorouridine-3'-phosphorothioate
  modified_base 3: mod_base = OTHER; note = 2'-deoxy-2'-fluoroguanosine-3'-phosphate
  modified_base 4: mod_base = OTHER; note = 2'-O-methyluridine-3'-phosphate
  modified_base 5: mod_base = OTHER; note = 2'-deoxy-2'-fluoroadenosine-3'-phosphate
  modified_base 6: mod_base = OTHER; note = 2'-deoxy-2'-fluorocytidine-3'-phosphate
  modified_base 7: mod_base = OTHER; note = 2'-O-methylcytidine-3'-phosphate
  modified_base 8: mod_base = OTHER; note = 2'-deoxy-2'-fluorocytidine-3'-phosphate
  modified_base 9: mod_base = OTHER; note = 2'-O-methyluridine-3'-phosphate
  modified_base 10: mod_base = OTHER; note = 2'-deoxy-2'-fluoroadenosine-3'-phosphate
  modified_base 11: mod_base = OTHER; note = 2'-O-methylguanosine-3'-phosphate
  modified_base 12: mod_base = OTHER; note = 2'-O-methylguanosine-3'-phosphate
  modified_base 13: mod_base = OTHER; note = 2'-O-methyladenosine-3'-phosphate
  modified_base 14: mod_base = OTHER; note = 2'-deoxy-2'-fluoroadenosine-3'-phosphate
  modified_base 15: mod_base = OTHER; note = 2'-deoxy-2'-fluoroadenosine-3'-phosphate
  modified_base 16: mod_base = OTHER; note = 2'-O-methyluridine-3'-phosphate
  modified_base 17: mod_base = OTHER; note = 2'-deoxy-2'-fluoroadenosine-3'-phosphate
  modified_base 18: mod_base = OTHER; note = 2'-deoxy-2'-fluorocytidine-3'-phosphate
  modified_base 19: mod_base = OTHER; note = 2'-O-methylcytidine-3'-phosphate
  modified_base 20: mod_base = OTHER; note = 2'-O-methyladenosine-3'-phosphate
  modified_base 21: mod_base = OTHER; note = 2'-O-methylguanosine-3'-phosphorothioate
  modified_base 22: mod_base = OTHER; note = 2'-O-methyladenosine-3'-phosphorothioate
  modified_base 23: mod_base = OTHER; note = 2'-O-methylguanosine
ttgtaccctaggaaataccagag

SEQ ID NO: 691 - RNA, 23 nt, synthetic construct
  source 1..23: mol_type = other RNA
  modified_base 1: mod_base = OTHER; note = 2'-O-methyluridine-3'-phosphorothioate
  modified_base 2: mod_base = OTHER; note = 2'-deoxy-2'-fluorouridine-3'-phosphorothioate
  modified_base 3: mod_base = OTHER; note = 2'-O-methylguanosine-3'-phosphate
  modified_base 4: mod_base = OTHER; note = 2'-O-methyluridine-3'-phosphate
  modified_base 5: mod_base = OTHER; note = 2'-O-methyladenosine-3'-phosphate
  modified_base 6: mod_base = OTHER; note = 2'-deoxy-2'-fluorocytidine-3'-phosphate
  modified_base 7: mod_base = OTHER; note = 2'-O-methylcytidine-3'-phosphate
  modified_base 8: mod_base = OTHER; note = 2'-O-methylcytidine-3'-phosphate
  modified_base 9: mod_base = OTHER; note = 2'-O-methyluridine-3'-phosphate
  modified_base 10: mod_base = OTHER; note = 2'-deoxy-2'-fluoroadenosine-3'-phosphate
  modified_base 11: mod_base = OTHER; note = 2'-O-methylguanosine-3'-phosphate
  modified_base 12: mod_base = OTHER; note = 2'-O-methylguanosine-3'-phosphate
  modified_base 13: mod_base = OTHER; note = 2'-O-methyladenosine-3'-phosphate
  modified_base 14: mod_base = OTHER; note = 2'-deoxy-2'-fluoroadenosine-3'-phosphate
  modified_base 15: mod_base = OTHER; note = 2'-O-methyladenosine-3'-phosphate
  modified_base 16: mod_base = OTHER; note = 2'-deoxy-2'-fluorouridine-3'-phosphate
  modified_base 17: mod_base = OTHER; note = 2'-O-methyladenosine-3'-phosphate
  modified_base 18: mod_base = OTHER; note = 2'-O-methylcytidine-3'-phosphate
  modified_base 19: mod_base = OTHER; note = 2'-O-methylcytidine-3'-phosphate
  modified_base 20: mod_base = OTHER; note = 2'-deoxy-2'-fluoroadenosine-3'-phosphate
  modified_base 21: mod_base = OTHER; note = 2'-O-methylguanosine-3'-phosphorothioate
  modified_base 22: mod_base = OTHER; note = 2'-O-methyladenosine-3'-phosphorothioate
  modified_base 23: mod_base = OTHER; note = 2'-O-methylguanosine
ttgtaccctaggaaataccagag

SEQ ID NO: 692 - RNA, 23 nt, synthetic construct
  source 1..23: mol_type = other RNA
  modified_base 1: mod_base = OTHER; note = 2'-O-methyluridine-3'-phosphorothioate
  modified_base 2: mod_base = OTHER; note = 2'-O-methyluridine-3'-phosphorothioate
  modified_base 3: mod_base = OTHER; note = 2'-O-methylguanosine-3'-phosphate
  modified_base 4: mod_base = OTHER; note = 2'-deoxy-2'-fluorouridine-3'-phosphate
  modified_base 5: mod_base = OTHER; note = 2'-O-methyladenosine-3'-phosphate
  modified_base 6: mod_base = OTHER; note = 2'-deoxy-2'-fluorocytidine-3'-phosphate
  modified_base 7: mod_base = OTHER; note = 2'-O-methylcytidine-3'-phosphate
  modified_base 8: mod_base = OTHER; note = 2'-deoxy-2'-fluorocytidine-3'-phosphate
  modified_base 9: mod_base = OTHER; note = 2'-O-methyluridine-3'-phosphate
  modified_base 10: mod_base = OTHER; note = 2'-deoxy-2'-fluoroadenosine-3'-phosphate
  modified_base 11: mod_base = OTHER; note = 2'-O-methylguanosine-3'-phosphate
  modified_base 12: mod_base = OTHER; note = 2'-O-methylguanosine-3'-phosphate
  modified_base 13: mod_base = OTHER; note = 2'-O-methyladenosine-3'-phosphate
  modified_base 14: mod_base = OTHER; note = 2'-deoxy-2'-fluoroadenosine-3'-phosphate
  modified_base 15: mod_base = OTHER; note = 2'-O-methyladenosine-3'-phosphate
  modified_base 16: mod_base = OTHER; note = 2'-deoxy-2'-fluorouridine-3'-phosphate
  modified_base 17: mod_base = OTHER; note = 2'-O-methyladenosine-3'-phosphate
  modified_base 18: mod_base = OTHER; note = 2'-deoxy-2'-fluorocytidine-3'-phosphate
  modified_base 19: mod_base = OTHER; note = 2'-O-methylcytidine-3'-phosphate
  modified_base 20: mod_base = OTHER; note = 2'-deoxy-2'-fluoroadenosine-3'-phosphate
  modified_base 21: mod_base = OTHER; note = 2'-O-methylguanosine-3'-phosphorothioate
  modified_base 22: mod_base = OTHER; note = 2'-O-methyladenosine-3'-phosphorothioate
  modified_base 23: mod_base = OTHER; note = 2'-O-methylguanosine
ttgtaccctaggaaataccagag

SEQ ID NO: 693 - RNA, 23 nt, synthetic construct
  source 1..23: mol_type = other RNA
  modified_base 1: mod_base = OTHER; note = 2'-O-methyluridine-3'-phosphorothioate
  modified_base 2: mod_base = OTHER; note = 2'-deoxy-2'-fluorouridine-3'-phosphorothioate
  modified_base 3: mod_base = OTHER; note = 2'-O-methylguanosine-3'-phosphate
  modified_base 4: mod_base = OTHER; note = 2'-O-methyluridine-3'-phosphate
  modified_base 5: mod_base = OTHER; note = 2'-O-methyladenosine-3'-phosphate
  modified_base 6: mod_base = OTHER; note = 2'-deoxy-2'-fluorocytidine-3'-phosphate
  modified_base 7: mod_base = OTHER; note = 2'-O-methylcytidine-3'-phosphate
  modified_base 8: mod_base = OTHER; note = 2'-O-methylcytidine-3'-phosphate
  modified_base 9: mod_base = OTHER; note = 2'-deoxy-2'-fluorouridine-3'-phosphate
  modified_base 10: mod_base = OTHER; note = 2'-O-methyladenosine-3'-phosphate
  modified_base 11: mod_base = OTHER; note = 2'-O-methylguanosine-3'-phosphate
  modified_base 12: mod_base = OTHER; note = 2'-O-methylguanosine-3'-phosphate
  modified_base 13: mod_base = OTHER; note = 2'-O-methyladenosine-3'-phosphate
  modified_base 14: mod_base = OTHER; note = 2'-deoxy-2'-fluoroadenosine-3'-phosphate
  modified_base 15: mod_base = OTHER; note = 2'-O-methyladenosine-3'-phosphate
  modified_base 16: mod_base = OTHER; note = 2'-deoxy-2'-fluorouridine-3'-phosphate
  modified_base 17: mod_base = OTHER; note = 2'-O-methyladenosine-3'-phosphate
  modified_base 18: mod_base = OTHER; note = 2'-O-methylcytidine-3'-phosphate
  modified_base 19: mod_base = OTHER; note = 2'-O-methylcytidine-3'-phosphate
  modified_base 20: mod_base = OTHER; note = 2'-O-methyladenosine-3'-phosphate
  modified_base 21: mod_base = OTHER; note = 2'-O-methylguanosine-3'-phosphorothioate
  modified_base 22: mod_base = OTHER; note = 2'-O-methyladenosine-3'-phosphorothioate
  modified_base 23: mod_base = OTHER; note = 2'-O-methylguanosine
ttgtaccctaggaaataccagag

SEQ ID NO: 694 - RNA, 23 nt, synthetic construct
  source 1..23: mol_type = other RNA
  modified_base 1: mod_base = OTHER; note = 2'-O-methyluridine-3'-phosphorothioate
  modified_base 2: mod_base = OTHER; note = 2'-deoxy-2'-fluorouridine-3'-phosphorothioate
  modified_base 3: mod_base = OTHER; note = 2'-O-methylguanosine-3'-phosphate
  modified_base 4: mod_base = OTHER; note = 2'-deoxy-2'-fluorouridine-3'-phosphate
  modified_base 5: mod_base = OTHER; note = 2'-O-methyladenosine-3'-phosphate
  modified_base 6: mod_base = OTHER; note = 2'-deoxy-2'-fluorocytidine-3'-phosphate
  modified_base 7: mod_base = OTHER; note = 2'-O-methylcytidine-3'-phosphate
  modified_base 8: mod_base = OTHER; note = 2'-deoxy-2'-fluorocytidine-3'-phosphate
  modified_base 9: mod_base = OTHER; note = 2'-O-methyluridine-3'-phosphate
  modified_base 10: mod_base = OTHER; note = 2'-deoxy-2'-fluoroadenosine-3'-phosphate
  modified_base 11: mod_base = OTHER; note = 2'-O-methylguanosine-3'-phosphate
  modified_base 12: mod_base = OTHER; note = 2'-O-methylguanosine-3'-phosphate
  modified_base 13: mod_base = OTHER; note = 2'-O-methyladenosine-3'-phosphate
  modified_base 14: mod_base = OTHER; note = 2'-deoxy-2'-fluoroadenosine-3'-phosphate
  modified_base 15: mod_base = OTHER; note = 2'-O-methyladenosine-3'-phosphate
  modified_base 16: mod_base = OTHER; note = 2'-deoxy-2'-fluorouridine-3'-phosphate
  modified_base 17: mod_base = OTHER; note = 2'-O-methyladenosine-3'-phosphate
  modified_base 18: mod_base = OTHER; note = 2'-deoxy-2'-fluorocytidine-3'-phosphate
  modified_base 19: mod_base = OTHER; note = 2'-O-methylcytidine-3'-phosphate
  modified_base 20: mod_base = OTHER; note = 2'-deoxy-2'-fluoroadenosine-3'-phosphate
  modified_base 21: mod_base = OTHER; note = 2'-O-methylguanosine-3'-phosphorothioate
  modified_base 22: mod_base = OTHER; note = 2'-O-methyladenosine-3'-phosphorothioate
  modified_base 23: mod_base = OTHER; note = 2'-O-methylguanosine
ttgtaccctaggaaataccagag

SEQ ID NO: 695 - RNA, 23 nt, synthetic construct
  source 1..23: mol_type = other RNA
  modified_base 1: mod_base = OTHER; note = 2'-O-methyluridine-3'-phosphorothioate
  modified_base 2: mod_base = OTHER; note = 2'-deoxy-2'-fluorouridine-3'-phosphorothioate
  modified_base 3: mod_base = OTHER; note = 2'-deoxy-2'-fluoroguanosine-3'-phosphate
  modified_base 4: mod_base = OTHER; note = 2'-O-methyluridine-3'-phosphate
  modified_base 5: mod_base = OTHER; note = 2'-deoxy-2'-fluoroadenosine-3'-phosphate
  modified_base 6: mod_base = OTHER; note = 2'-deoxy-2'-fluorocytidine-3'-phosphate
  modified_base 7: mod_base = OTHER; note = 2'-O-methylcytidine-3'-phosphate
  modified_base 8: mod_base = OTHER; note = 2'-deoxy-2'-fluorocytidine-3'-phosphate
  modified_base 9: mod_base = OTHER; note = 2'-O-methyluridine-3'-phosphate
  modified_base 10: mod_base = OTHER; note = 2'-deoxy-2'-fluoroadenosine-3'-phosphate
  modified_base 11: mod_base = OTHER; note = 2'-O-methylguanosine-3'-phosphate
  modified_base 12: mod_base = OTHER; note = 2'-O-methylguanosine-3'-phosphate
  modified_base 13: mod_base = OTHER; note = 2'-O-methyladenosine-3'-phosphate
  modified_base 14: mod_base = OTHER; note = 2'-deoxy-2'-fluoroadenosine-3'-phosphate
  modified_base 15: mod_base = OTHER; note = 2'-deoxy-2'-fluoroadenosine-3'-phosphate
  modified_base 16: mod_base = OTHER; note = 2'-O-methyluridine-3'-phosphate
  modified_base 17: mod_base = OTHER; note = 2'-deoxy-2'-fluoroadenosine-3'-phosphate
  modified_base 18: mod_base = OTHER; note = 2'-O-methylcytidine-3'-phosphate
  modified_base 19: mod_base = OTHER; note = 2'-O-methylcytidine-3'-phosphate
  modified_base 20: mod_base = OTHER; note = 2'-deoxy-2'-fluoroadenosine-3'-phosphate
  modified_base 21: mod_base = OTHER; note = 2'-O-methylguanosine-3'-phosphorothioate
  modified_base 22: mod_base = OTHER; note = 2'-O-methyladenosine-3'-phosphorothioate
  modified_base 23: mod_base = OTHER; note = 2'-O-methylguanosine
ttgtaccctaggaaataccagag

SEQ ID NO: 696 - RNA, 23 nt, synthetic construct
  source 1..23: mol_type = other RNA
  modified_base 1: mod_base = OTHER; note = 2'-O-methyluridine-3'-phosphorothioate
  modified_base 2: mod_base = OTHER; note = 2'-deoxy-2'-fluorouridine-3'-phosphorothioate
  modified_base 3: mod_base = OTHER; note = 2'-O-methylguanosine-3'-phosphate
  modified_base 4: mod_base = OTHER; note = 2'-O-methyluridine-3'-phosphate
  modified_base 5: mod_base = OTHER; note = 2'-O-methyladenosine-3'-phosphate
  modified_base 6: mod_base = OTHER; note = 2'-deoxy-2'-fluorocytidine-3'-phosphate
  modified_base 7: mod_base = OTHER; note = 2'-O-methylcytidine-3'-phosphate
  modified_base 8: mod_base = OTHER; note = 2'-O-methylcytidine-3'-phosphate
  modified_base 9: mod_base = OTHER; note = 2'-deoxy-2'-fluorouridine-3'-phosphate
  modified_base 10: mod_base = OTHER; note = 2'-O-methyladenosine-3'-phosphate
  modified_base 11: mod_base = OTHER; note = 2'-O-methylguanosine-3'-phosphate
  modified_base 12: mod_base = OTHER; note = 2'-O-methylguanosine-3'-phosphate
  modified_base 13: mod_base = OTHER; note = 2'-O-methyladenosine-3'-phosphate
  modified_base 14: mod_base = OTHER; note = 2'-deoxy-2'-fluoroadenosine-3'-phosphate
  modified_base 15: mod_base = OTHER; note = 2'-O-methyladenosine-3'-phosphate
  modified_base 16: mod_base = OTHER; note = 2'-deoxy-2'-fluorouridine-3'-phosphate
  modified_base 17: mod_base = OTHER; note = 2'-O-methyladenosine-3'-phosphate
  modified_base 18: mod_base = OTHER; note = 2'-O-methylcytidine-3'-phosphate
  modified_base 19: mod_base = OTHER; note = 2'-O-methylcytidine-3'-phosphate
  modified_base 20: mod_base = OTHER; note = 2'-O-methyladenosine-3'-phosphate
  modified_base 21: mod_base = OTHER; note = 2'-O-methylguanosine-3'-phosphorothioate
  modified_base 22: mod_base = OTHER; note = 2'-O-methyladenosine-3'-phosphorothioate
  modified_base 23: mod_base = OTHER; note = 2'-O-methylguanosine
ttgtaccctaggaaataccagag

SEQ ID NO: 697 - RNA, 23 nt, synthetic construct
  source 1..23: mol_type = other RNA
  modified_base 1: mod_base = OTHER; note = 2'-O-methyluridine-3'-phosphorothioate
  modified_base 2: mod_base = OTHER; note = 2'-deoxy-2'-fluorouridine-3'-phosphorothioate
  modified_base 3: mod_base = OTHER; note = 2'-deoxy-2'-fluoroguanosine-3'-phosphate
  modified_base 4: mod_base = OTHER; note = 2'-O-methyluridine-3'-phosphate
  modified_base 5: mod_base = OTHER; note = 2'-deoxy-2'-fluoroadenosine-3'-phosphate
  modified_base 6: mod_base = OTHER; note = 2'-deoxy-2'-fluorocytidine-3'-phosphate
  modified_base 7: mod_base = OTHER; note = 2'-O-methylcytidine-3'-phosphate
  modified_base 8: mod_base = OTHER; note = 2'-deoxy-2'-fluorocytidine-3'-phosphate
  modified_base 9: mod_base = OTHER; note = 2'-O-methyluridine-3'-phosphate
  modified_base 10: mod_base = OTHER; note = 2'-deoxy-2'-fluoroadenosine-3'-phosphate
  modified_base 11: mod_base = OTHER; note = 2'-O-methylguanosine-3'-phosphate
  modified_base 12: mod_base = OTHER; note = 2'-O-methylguanosine-3'-phosphate
  modified_base 13: mod_base = OTHER; note = 2'-O-methyladenosine-3'-phosphate
  modified_base 14: mod_base = OTHER; note = 2'-deoxy-2'-fluoroadenosine-3'-phosphate
  modified_base 15: mod_base = OTHER; note = 2'-deoxy-2'-fluoroadenosine-3'-phosphate
  modified_base 16: mod_base = OTHER; note = 2'-O-methyluridine-3'-phosphate
  modified_base 17: mod_base = OTHER; note = 2'-deoxy-2'-fluoroadenosine-3'-phosphate
  modified_base 18: mod_base = OTHER; note = 2'-O-methylcytidine-3'-phosphate
  modified_base 19: mod_base = OTHER; note = 2'-O-methylcytidine-3'-phosphate
  modified_base 20: mod_base = OTHER; note = 2'-O-methyladenosine-3'-phosphate
  modified_base 21: mod_base = OTHER; note = 2'-O-methylguanosine-3'-phosphorothioate
  modified_base 22: mod_base = OTHER; note = 2'-O-methyladenosine-3'-phosphorothioate
  modified_base 23: mod_base = OTHER; note = 2'-O-methylguanosine
ttgtaccctaggaaataccagag

SEQ ID NO: 698 - RNA, 23 nt, synthetic construct
  source 1..23: mol_type = other RNA
  modified_base 1: mod_base = OTHER; note = 2'-O-methyluridine-3'-phosphorothioate
  modified_base 2: mod_base = OTHER; note = 2'-deoxy-2'-fluorouridine-3'-phosphorothioate
  modified_base 3: mod_base = OTHER; note = 2'-O-methylguanosine-3'-phosphate
  modified_base 4: mod_base = OTHER; note = 2'-deoxy-2'-fluorouridine-3'-phosphate
  modified_base 5: mod_base = OTHER; note = 2'-O-methyladenosine-3'-phosphate
  modified_base 6: mod_base = OTHER; note = 2'-deoxy-2'-fluorocytidine-3'-phosphate
  modified_base 7: mod_base = OTHER; note = 2'-O-methylcytidine-3'-phosphate
  modified_base 8: mod_base = OTHER; note = 2'-deoxy-2'-fluorocytidine-3'-phosphate
  modified_base 9: mod_base = OTHER; note = 2'-O-methyluridine-3'-phosphate
  modified_base 10: mod_base = OTHER; note = 2'-deoxy-2'-fluoroadenosine-3'-phosphate
  modified_base 11: mod_base = OTHER; note = 2'-O-methylguanosine-3'-phosphate
  modified_base 12: mod_base = OTHER; note = 2'-O-methylguanosine-3'-phosphate
  modified_base 13: mod_base = OTHER; note = 2'-O-methyladenosine-3'-phosphate
  modified_base 14: mod_base = OTHER; note = 2'-deoxy-2'-fluoroadenosine-3'-phosphate
  modified_base 15: mod_base = OTHER; note = 2'-O-methyladenosine-3'-phosphate
  modified_base 16: mod_base = OTHER; note = 2'-deoxy-2'-fluorouridine-3'-phosphate
  modified_base 17: mod_base = OTHER; note = 2'-O-methyladenosine-3'-phosphate
  modified_base 18: mod_base = OTHER; note = 2'-deoxy-2'-fluorocytidine-3'-phosphate
  modified_base 19: mod_base = OTHER; note = 2'-O-methylcytidine-3'-phosphate
  modified_base 20: mod_base = OTHER; note = 2'-deoxy-2'-fluoroadenosine-3'-phosphate
  modified_base 21: mod_base = OTHER; note = 2'-O-methylguanosine-3'-phosphorothioate
  modified_base 22: mod_base = OTHER; note = 2'-O-methyladenosine-3'-phosphorothioate
  modified_base 23: mod_base = OTHER; note = 2'-O-methylguanosine
ttgtaccctaggaaataccagag

SEQ ID NO: 699 - RNA, 23 nt, synthetic construct
  source 1..23: mol_type = other RNA
  modified_base 1: mod_base = OTHER; note = 2'-O-methyluridine-3'-phosphorothioate
  modified_base 2: mod_base = OTHER; note = 2'-deoxy-2'-fluorouridine-3'-phosphorothioate
  modified_base 3: mod_base = OTHER; note = 2'-O-methylguanosine-3'-phosphate
  modified_base 4: mod_base = OTHER; note = 2'-deoxy-2'-fluorouridine-3'-phosphate
  modified_base 5: mod_base = OTHER; note = 2'-O-methyladenosine-3'-phosphate
  modified_base 6: mod_base = OTHER; note = 2'-deoxy-2'-fluorocytidine-3'-phosphate
  modified_base 7: mod_base = OTHER; note = 2'-O-methylcytidine-3'-phosphate
  modified_base 8: mod_base = OTHER; note = 2'-deoxy-2'-fluorocytidine-3'-phosphate
  modified_base 9: mod_base = OTHER; note = 2'-O-methyluridine-3'-phosphate
  modified_base 10: mod_base = OTHER; note = 2'-deoxy-2'-fluoroadenosine-3'-phosphate
  modified_base 11: mod_base = OTHER; note = 2'-O-methylguanosine-3'-phosphate
  modified_base 12: mod_base = OTHER; note = 2'-O-methylguanosine-3'-phosphate
  modified_base 13: mod_base = OTHER; note = 2'-O-methyladenosine-3'-phosphate
  modified_base 14: mod_base = OTHER; note = 2'-deoxy-2'-fluoroadenosine-3'-phosphate
  modified_base 15: mod_base = OTHER; note = 2'-O-methyladenosine-3'-phosphate
  modified_base 16: mod_base = OTHER; note = 2'-deoxy-2'-fluorouridine-3'-phosphate
  modified_base 17: mod_base = OTHER; note = 2'-O-methyladenosine-3'-phosphate
  modified_base 18: mod_base = OTHER; note = 2'-deoxy-2'-fluorocytidine-3'-phosphate
  modified_base 19: mod_base = OTHER; note = 2'-O-methylcytidine-3'-phosphate
  modified_base 20: mod_base = OTHER; note = 2'-deoxy-2'-fluoroadenosine-3'-phosphate
  modified_base 21: mod_base = OTHER; note = 2'-O-methylguanosine-3'-phosphorothioate
  modified_base 22: mod_base = OTHER; note = 2'-O-methyladenosine-3'-phosphorothioate
  modified_base 23: mod_base = OTHER; note = 2'-O-methylguanosine
ttgtaccctaggaaataccagag

SEQ ID NO: 700 - RNA, 23 nt, synthetic construct
  source 1..23: mol_type = other RNA
  modified_base 1: mod_base = OTHER; note = 2'-O-methyluridine-3'-phosphorothioate
  modified_base 2: mod_base = OTHER; note = 2'-deoxy-2'-fluorouridine-3'-phosphorothioate
  modified_base 3: mod_base = OTHER; note = 2'-O-methylguanosine-3'-phosphate
  modified_base 4: mod_base = OTHER; note = 2'-deoxy-2'-fluorouridine-3'-phosphate
  modified_base 5: mod_base = OTHER; note = 2'-O-methyladenosine-3'-phosphate
  modified_base 6: mod_base = OTHER; note = 2'-deoxy-2'-fluorocytidine-3'-phosphate
  modified_base 7: mod_base = OTHER; note = 2'-O-methylcytidine-3'-phosphate
  modified_base 8: mod_base = OTHER; note = 2'-deoxy-2'-fluorocytidine-3'-phosphate
  modified_base 9: mod_base = OTHER; note = 2'-O-methyluridine-3'-phosphate
  modified_base 10: mod_base = OTHER; note = 2'-deoxy-2'-fluoroadenosine-3'-phosphate
  modified_base 11: mod_base = OTHER; note = 2'-O-methylguanosine-3'-phosphate
  modified_base 12: mod_base = OTHER; note = 2'-O-methylguanosine-3'-phosphate
  modified_base 13: mod_base = OTHER; note = 2'-O-methyladenosine-3'-phosphate
  modified_base 14: mod_base = OTHER; note = 2'-deoxy-2'-fluoroadenosine-3'-phosphate
  modified_base 15: mod_base = OTHER; note = 2'-O-methyladenosine-3'-phosphate
  modified_base 16: mod_base = OTHER; note = 2'-deoxy-2'-fluorouridine-3'-phosphate
  modified_base 17: mod_base = OTHER; note = 2'-O-methyladenosine-3'-phosphate
  modified_base 18: mod_base = OTHER; note = 2'-deoxy-2'-fluorocytidine-3'-phosphate
  modified_base 19: mod_base = OTHER; note = 2'-O-methylcytidine-3'-phosphate
  modified_base 20: mod_base = OTHER; note = 2'-deoxy-2'-fluoroadenosine-3'-phosphate
  modified_base 21: mod_base = OTHER; note = 2'-O-methylguanosine-3'-phosphorothioate
  modified_base 22: mod_base = OTHER; note = 2'-O-methyladenosine-3'-phosphorothioate
  modified_base 23: mod_base = OTHER; note = 2'-O-methylguanosine
ttgtaccctaggaaataccagag

SEQ ID NO: 701 - RNA, 23 nt, synthetic construct
  source 1..23: mol_type = other RNA
  modified_base 1: mod_base = OTHER; note = 2'-O-methyluridine-3'-phosphorothioate
  modified_base 2: mod_base = OTHER; note = 2'-deoxy-2'-fluorouridine-3'-phosphorothioate
  modified_base 3: mod_base = OTHER; note = 2'-O-methylguanosine-3'-phosphate
  modified_base 4: mod_base = OTHER; note = 2'-O-methyluridine-3'-phosphate
  modified_base 5: mod_base = OTHER; note = 2'-O-methyladenosine-3'-phosphate
  modified_base 6: mod_base = OTHER; note = 2'-deoxy-2'-fluorocytidine-3'-phosphate
  modified_base 7: mod_base = OTHER; note = 2'-O-methylcytidine-3'-phosphate
  modified_base 8: mod_base = OTHER; note = 2'-O-methylcytidine-3'-phosphate
  modified_base 9: mod_base = OTHER; note = 2'-deoxy-2'-fluorouridine-3'-phosphate
  modified_base 10: mod_base = OTHER; note = 2'-O-methyladenosine-3'-phosphate
  modified_base 11: mod_base = OTHER; note = 2'-O-methylguanosine-3'-phosphate
  modified_base 12: mod_base = OTHER; note = 2'-O-methylguanosine-3'-phosphate
  modified_base 13: mod_base = OTHER; note = 2'-O-methyladenosine-3'-phosphate
  modified_base 14: mod_base = OTHER; note = 2'-deoxy-2'-fluoroadenosine-3'-phosphate
  modified_base 15: mod_base = OTHER; note = 2'-O-methyladenosine-3'-phosphate
  modified_base 16: mod_base = OTHER; note = 2'-deoxy-2'-fluorouridine-3'-phosphate
  modified_base 17: mod_base = OTHER; note = 2'-O-methyladenosine-3'-phosphate
  modified_base 18: mod_base = OTHER; note = 2'-O-methylcytidine-3'-phosphate
  modified_base 19: mod_base = OTHER; note = 2'-O-methylcytidine-3'-phosphate
  modified_base 20: mod_base = OTHER; note = 2'-O-methyladenosine-3'-phosphate
  modified_base 21: mod_base = OTHER; note = 2'-O-methylguanosine-3'-phosphorothioate
  modified_base 22: mod_base = OTHER; note = 2'-O-methyladenosine-3'-phosphorothioate
  modified_base 23: mod_base = OTHER; note = 2'-O-methylguanosine
ttgtaccctaggaaataccagag

SEQ ID NO: 702 - RNA, 23 nt, synthetic construct
  source 1..23: mol_type = other RNA
  modified_base 1: mod_base = OTHER; note = 2'-O-methyluridine-3'-phosphorothioate
  modified_base 2: mod_base = OTHER; note = 2'-deoxy-2'-fluorouridine-3'-phosphorothioate
  modified_base 3: mod_base = OTHER; note = 2'-O-methylguanosine-3'-phosphate
  modified_base 4: mod_base = OTHER; note = 2'-deoxy-2'-fluorouridine-3'-phosphate
  modified_base 5: mod_base = OTHER; note = 2'-O-methyladenosine-3'-phosphate
  modified_base 6: mod_base = OTHER; note = 2'-deoxy-2'-fluorocytidine-3'-phosphate
  modified_base 7: mod_base = OTHER; note = 2'-O-methylcytidine-3'-phosphate
  modified_base 8: mod_base = OTHER; note = 2'-deoxy-2'-fluorocytidine-3'-phosphate
  modified_base 9: mod_base = OTHER; note = 2'-O-methyluridine-3'-phosphate
  modified_base 10: mod_base = OTHER; note = 2'-deoxy-2'-fluoroadenosine-3'-phosphate
  modified_base 11: mod_base = OTHER; note = 2'-O-methylguanosine-3'-phosphate
  modified_base 12: mod_base = OTHER; note = 2'-O-methylguanosine-3'-phosphate
  modified_base 13: mod_base = OTHER; note = 2'-O-methyladenosine-3'-phosphate
  modified_base 14: mod_base = OTHER; note = 2'-deoxy-2'-fluoroadenosine-3'-phosphate
  modified_base 15: mod_base = OTHER; note = 2'-O-methyladenosine-3'-phosphate
  modified_base 16: mod_base = OTHER; note = 2'-deoxy-2'-fluorouridine-3'-phosphate
  modified_base 17: mod_base = OTHER; note = 2'-O-methyladenosine-3'-phosphate
  modified_base 18: mod_base = OTHER; note = 2'-deoxy-2'-fluorocytidine-3'-phosphate
  modified_base 19: mod_base = OTHER; note = 2'-O-methylcytidine-3'-phosphate
  modified_base 20: mod_base = OTHER; note = 2'-deoxy-2'-fluoroadenosine-3'-phosphate
  modified_base 21: mod_base = OTHER; note = 2'-O-methylguanosine-3'-phosphorothioate
  modified_base 22: mod_base = OTHER; note = 2'-O-methyladenosine-3'-phosphorothioate
  modified_base 23: mod_base = OTHER; note = 2'-O-methylguanosine
ttgtaccctaggaaataccagag

SEQ ID NO: 703 - RNA, 23 nt, synthetic construct
  source 1..23: mol_type = other RNA
  modified_base 1: mod_base = OTHER; note = 2'-O-methyluridine-3'-phosphorothioate
  modified_base 2: mod_base = OTHER; note = 2'-deoxy-2'-fluorouridine-3'-phosphorothioate
  modified_base 3: mod_base = OTHER; note = 2'-O-methylguanosine-3'-phosphate
  modified_base 4: mod_base = OTHER; note = 2'-deoxy-2'-fluorouridine-3'-phosphate
  modified_base 5: mod_base = OTHER; note = 2'-O-methyladenosine-3'-phosphate
  modified_base 6: mod_base = OTHER; note = 2'-deoxy-2'-fluorocytidine-3'-phosphate
  modified_base 7: mod_base = OTHER; note = 2'-O-methylcytidine-3'-phosphate
  modified_base 8: mod_base = OTHER; note = 2'-deoxy-2'-fluorocytidine-3'-phosphate
  modified_base 9: mod_base = OTHER; note = 2'-O-methyluridine-3'-phosphate
  modified_base 10: mod_base = OTHER; note = 2'-deoxy-2'-fluoroadenosine-3'-phosphate
  modified_base 11: mod_base = OTHER; note = 2'-O-methylguanosine-3'-phosphate
  modified_base 12: mod_base = OTHER; note = 2'-O-methylguanosine-3'-phosphate
  modified_base 13: mod_base = OTHER; note = 2'-O-methyladenosine-3'-phosphate
  modified_base 14: mod_base = OTHER; note = 2'-deoxy-2'-fluoroadenosine-3'-phosphate
  modified_base 15: mod_base = OTHER; note = 2'-O-methyladenosine-3'-phosphate
  modified_base 16: mod_base = OTHER; note = 2'-deoxy-2'-fluorouridine-3'-phosphate
  modified_base 17: mod_base = OTHER; note = 2'-O-methyladenosine-3'-phosphate
  modified_base 18: mod_base = OTHER; note = 2'-deoxy-2'-fluorocytidine-3'-phosphate
  modified_base 19: mod_base = OTHER; note = 2'-O-methylcytidine-3'-phosphate
  modified_base 20: mod_base = OTHER; note = 2'-deoxy-2'-fluoroadenosine-3'-phosphate
  modified_base 21: mod_base = OTHER; note = 2'-O-methylguanosine-3'-phosphorothioate
  modified_base 22: mod_base = OTHER; note = 2'-O-methyladenosine-3'-phosphorothioate
  modified_base 23: mod_base = OTHER; note = 2'-O-methylguanosine
ttgtaccctaggaaataccagag

SEQ ID NO: 704 - RNA, 23 nt, synthetic construct
  source 1..23: mol_type = other RNA
  modified_base 1: mod_base = OTHER; note = 2'-O-methyluridine-3'-phosphorothioate
  modified_base 2: mod_base = OTHER; note = 2'-deoxy-2'-fluorouridine-3'-phosphorothioate
  modified_base 3: mod_base = OTHER; note = 2'-O-methylguanosine-3'-phosphate
  modified_base 4: mod_base = OTHER; note = 2'-deoxy-2'-fluorouridine-3'-phosphate
  modified_base 5: mod_base = OTHER; note = 2'-O-methyladenosine-3'-phosphate
  modified_base 6: mod_base = OTHER; note = 2'-deoxy-2'-fluorocytidine-3'-phosphate
  modified_base 7: mod_base = OTHER; note = 2'-O-methylcytidine-3'-phosphate
  modified_base 8: mod_base = OTHER; note = 2'-deoxy-2'-fluorocytidine-3'-phosphate
  modified_base 9: mod_base = OTHER; note = 2'-O-methyluridine-3'-phosphate
  modified_base 10: mod_base = OTHER; note = 2'-deoxy-2'-fluoroadenosine-3'-phosphate
  modified_base 11: mod_base = OTHER; note = 2'-O-methylguanosine-3'-phosphate
  modified_base 12: mod_base = OTHER; note = 2'-O-methylguanosine-3'-phosphate
  modified_base 13: mod_base = OTHER; note = 2'-O-methyladenosine-3'-phosphate
  modified_base 14: mod_base = OTHER; note = 2'-deoxy-2'-fluoroadenosine-3'-phosphate
  modified_base 15: mod_base = OTHER; note = 2'-O-methyladenosine-3'-phosphate
  modified_base 16: mod_base = OTHER; note = 2'-deoxy-2'-fluorouridine-3'-phosphate
  modified_base 17: mod_base = OTHER; note = 2'-O-methyladenosine-3'-phosphate
  modified_base 18: mod_base = OTHER; note = 2'-deoxy-2'-fluorocytidine-3'-phosphate
  modified_base 19: mod_base = OTHER; note = 2'-O-methylcytidine-3'-phosphate
  modified_base 20: mod_base = OTHER; note = 2'-deoxy-2'-fluoroadenosine-3'-phosphate
  modified_base 21: mod_base = OTHER; note = 2'-O-methylguanosine-3'-phosphorothioate
  modified_base 22: mod_base = OTHER; note = 2'-O-methyladenosine-3'-phosphorothioate
  modified_base 23: mod_base = OTHER; note = 2'-O-methylguanosine
ttgtaccctaggaaataccagag

SEQ ID NO: 705 - RNA, 23 nt, synthetic construct
  source 1..23: mol_type = other RNA
  modified_base 1: mod_base = OTHER; note = 2'-O-methyluridine-3'-phosphorothioate
  modified_base 2: mod_base = OTHER; note = 2'-deoxy-2'-fluorouridine-3'-phosphorothioate
  modified_base 3: mod_base = OTHER; note = 2'-O-methylguanosine-3'-phosphate
  modified_base 4: mod_base = OTHER; note = 2'-deoxy-2'-fluorouridine-3'-phosphate
  modified_base 5: mod_base = OTHER; note = 2'-O-methyladenosine-3'-phosphate
  modified_base 6: mod_base = OTHER; note = 2'-deoxy-2'-fluorocytidine-3'-phosphate
  modified_base 7: mod_base = OTHER; note = 2'-O-methylcytidine-3'-phosphate
  modified_base 8: mod_base = OTHER; note = 2'-deoxy-2'-fluorocytidine-3'-phosphate
  modified_base 9: mod_base = OTHER; note = 2'-O-methyluridine-3'-phosphate
  modified_base 10: mod_base = OTHER; note = 2'-deoxy-2'-fluoroadenosine-3'-phosphate
  modified_base 11: mod_base = OTHER; note = 2'-O-methylguanosine-3'-phosphate
  modified_base 12: mod_base = OTHER; note = 2'-O-methylguanosine-3'-phosphate
  modified_base 13: mod_base = OTHER; note = 2'-O-methyladenosine-3'-phosphate
  modified_base 14: mod_base = OTHER; note = 2'-deoxy-2'-fluoroadenosine-3'-phosphate
  modified_base 15: mod_base = OTHER; note = 2'-O-methyladenosine-3'-phosphate
  modified_base 16: mod_base = OTHER; note = 2'-deoxy-2'-fluorouridine-3'-phosphate
  modified_base 17: mod_base = OTHER; note = 2'-O-methyladenosine-3'-phosphate
  modified_base 18: mod_base = OTHER; note = 2'-deoxy-2'-fluorocytidine-3'-phosphate
  modified_base 19: mod_base = OTHER; note = 2'-O-methylcytidine-3'-phosphate
  modified_base 20: mod_base = OTHER; note = 2'-deoxy-2'-fluoroadenosine-3'-phosphate
  modified_base 21: mod_base = OTHER; note = 2'-O-methylguanosine-3'-phosphorothioate
  modified_base 22: mod_base = OTHER; note = 2'-O-methyladenosine-3'-phosphorothioate
  modified_base 23: mod_base = OTHER; note = 2'-O-methylguanosine
ttgtaccctaggaaataccagag

SEQ ID NO: 706 - RNA, 23 nt, synthetic construct
  source 1..23: mol_type = other RNA
  modified_base 1: mod_base = OTHER; note = 2'-O-methyluridine-3'-phosphorothioate
  modified_base 2: mod_base = OTHER; note = 2'-deoxy-2'-fluorouridine-3'-phosphorothioate
  modified_base 3: mod_base = OTHER; note = 2'-O-methylguanosine-3'-phosphate
  modified_base 4: mod_base = OTHER; note = 2'-O-methyluridine-3'-phosphate
  modified_base 5: mod_base = OTHER; note = 2'-O-methyladenosine-3'-phosphate
  modified_base 6: mod_base = OTHER; note = 2'-deoxy-2'-fluorocytidine-3'-phosphate
  modified_base 7: mod_base = OTHER; note = 2'-O-methylcytidine-3'-phosphate
  modified_base 8: mod_base = OTHER; note = 2'-O-methylcytidine-3'-phosphate
  modified_base 9: mod_base = OTHER; note = 2'-deoxy-2'-fluorouridine-3'-phosphate
  modified_base 10: mod_base = OTHER; note = 2'-O-methyladenosine-3'-phosphate
  modified_base 11: mod_base = OTHER; note = 2'-O-methylguanosine-3'-phosphate
  modified_base 12: mod_base = OTHER; note = 2'-O-methylguanosine-3'-phosphate
  modified_base 13: mod_base = OTHER; note = 2'-O-methyladenosine-3'-phosphate
  modified_base 14: mod_base = OTHER; note = 2'-deoxy-2'-fluoroadenosine-3'-phosphate
  modified_base 15: mod_base = OTHER; note = 2'-O-methyladenosine-3'-phosphate
  modified_base 16: mod_base = OTHER; note = 2'-deoxy-2'-fluorouridine-3'-phosphate
  modified_base 17: mod_base = OTHER; note = 2'-O-methyladenosine-3'-phosphate
  modified_base 18: mod_base = OTHER; note = 2'-O-methylcytidine-3'-phosphate
  modified_base 19: mod_base = OTHER; note = 2'-O-methylcytidine-3'-phosphate
  modified_base 20: mod_base = OTHER; note = 2'-O-methyladenosine-3'-phosphate
  modified_base 21: mod_base = OTHER; note = 2'-O-methylguanosine-3'-phosphorothioate
  modified_base 22: mod_base = OTHER; note = 2'-O-methyladenosine-3'-phosphorothioate
  modified_base 23: mod_base = OTHER; note = 2'-O-methylguanosine
ttgtaccctaggaaataccagag

SEQ ID NO: 707 - RNA, 23 nt, synthetic construct
  source 1..23: mol_type = other RNA
  modified_base 1: mod_base = OTHER; note = 2'-O-methyluridine-3'-phosphorothioate
  modified_base 2: mod_base = OTHER; note = 2'-deoxy-2'-fluorouridine-3'-phosphorothioate
  modified_base 3: mod_base = OTHER; note = 2'-O-methylguanosine-3'-phosphate
  modified_base 4: mod_base = OTHER; note = 2'-deoxy-2'-fluorouridine-3'-phosphate
  modified_base 5: mod_base = OTHER; note = 2'-O-methyladenosine-3'-phosphate
  modified_base 6: mod_base = OTHER; note = 2'-deoxy-2'-fluorocytidine-3'-phosphate
  modified_base 7: mod_base = OTHER; note = 2'-O-methylcytidine-3'-phosphate
  modified_base 8: mod_base = OTHER; note = 2'-deoxy-2'-fluorocytidine-3'-phosphate
  modified_base 9: mod_base = OTHER; note = 2'-O-methyluridine-3'-phosphate
  modified_base 10: mod_base = OTHER; note = 2'-deoxy-2'-fluoroadenosine-3'-phosphate
  modified_base 11: mod_base = OTHER; note = 2'-O-methylguanosine-3'-phosphate
  modified_base 12: mod_base = OTHER; note = 2'-O-methylguanosine-3'-phosphate
  modified_base 13: mod_base = OTHER; note = 2'-O-methyladenosine-3'-phosphate
  modified_base 14: mod_base = OTHER; note = 2'-deoxy-2'-fluoroadenosine-3'-phosphate
  modified_base 15: mod_base = OTHER; note = 2'-O-methyladenosine-3'-phosphate
  modified_base 16: mod_base = OTHER; note = 2'-deoxy-2'-fluorouridine-3'-phosphate
  modified_base 17: mod_base = OTHER; note = 2'-O-methyladenosine-3'-phosphate
  modified_base 18: mod_base = OTHER; note = 2'-deoxy-2'-fluorocytidine-3'-phosphate
  modified_base 19: mod_base = OTHER; note = 2'-O-methylcytidine-3'-phosphate
  modified_base 20: mod_base = OTHER; note = 2'-deoxy-2'-fluoroadenosine-3'-phosphate
  modified_base 21: mod_base = OTHER; note = 2'-O-methylguanosine-3'-phosphorothioate
  modified_base 22: mod_base = OTHER; note = 2'-O-methyladenosine-3'-phosphorothioate
  modified_base 23: mod_base = OTHER; note = 2'-O-methylguanosine
ttgtaccctaggaaataccagag

SEQ ID NO: 708 - RNA, 23 nt, synthetic construct
  source 1..23: mol_type = other RNA
  modified_base 1: mod_base = OTHER; note = 2'-O-methyluridine-3'-phosphorothioate
  modified_base 2: mod_base = OTHER; note = 2'-deoxy-2'-fluorouridine-3'-phosphorothioate
  modified_base 3: mod_base = OTHER; note = 2'-O-methylguanosine-3'-phosphate
  modified_base 4: mod_base = OTHER; note = 2'-O-methyluridine-3'-phosphate
  modified_base 5: mod_base = OTHER; note = 2'-O-methyladenosine-3'-phosphate
  modified_base 6: mod_base = OTHER; note = 2'-deoxy-2'-fluorocytidine-3'-phosphate
  modified_base 7: mod_base = OTHER; note = 2'-O-methylcytidine-3'-phosphate
  modified_base 8: mod_base = OTHER; note = 2'-O-methylcytidine-3'-phosphate
  modified_base 9: mod_base = OTHER; note = 2'-deoxy-2'-fluorouridine-3'-phosphate
  modified_base 10: mod_base = OTHER; note = 2'-O-methyladenosine-3'-phosphate
  modified_base 11: mod_base = OTHER; note = 2'-O-methylguanosine-3'-phosphate
  modified_base 12: mod_base = OTHER; note = 2'-O-methylguanosine-3'-phosphate
  modified_base 13: mod_base = OTHER; note = 2'-O-methyladenosine-3'-phosphate
  modified_base 14: mod_base = OTHER; note = 2'-deoxy-2'-fluoroadenosine-3'-phosphate
  modified_base 15: mod_base = OTHER; note = 2'-O-methyladenosine-3'-phosphate
  modified_base 16: mod_base = OTHER; note = 2'-deoxy-2'-fluorouridine-3'-phosphate
  modified_base 17: mod_base = OTHER; note = 2'-O-methyladenosine-3'-phosphate
  modified_base 18: mod_base = OTHER; note = 2'-O-methylcytidine-3'-phosphate
  modified_base 19: mod_base = OTHER; note = 2'-O-methylcytidine-3'-phosphate
  modified_base 20: mod_base = OTHER; note = 2'-O-methyladenosine-3'-phosphate
  modified_base 21: mod_base = OTHER; note = 2'-O-methylguanosine-3'-phosphorothioate
  modified_base 22: mod_base = OTHER; note = 2'-O-methyladenosine-3'-phosphorothioate
  modified_base 23: mod_base = OTHER; note = 2'-O-methylguanosine
ttgtaccctaggaaataccagag

SEQ ID NO: 709 - RNA, 23 nt, synthetic construct
  source 1..23: mol_type = other RNA
  modified_base 1: mod_base = OTHER; note = 2'-O-methyluridine-3'-phosphorothioate
  modified_base 2: mod_base = OTHER; note = 2'-deoxy-2'-fluorouridine-3'-phosphorothioate
  modified_base 3: mod_base = OTHER; note = 2'-O-methylguanosine-3'-phosphate
  modified_base 4: mod_base = OTHER; note = 2'-O-methyluridine-3'-phosphate
  modified_base 5: mod_base = OTHER; note = 2'-O-methyladenosine-3'-phosphate
  modified_base 6: mod_base = OTHER; note = 2'-deoxy-2'-fluorocytidine-3'-phosphate
  modified_base 7: mod_base = OTHER; note = 2'-O-methylcytidine-3'-phosphate
  modified_base 8: mod_base = OTHER; note = 2'-O-methylcytidine-3'-phosphate
  modified_base 9: mod_base = OTHER; note = 2'-deoxy-2'-fluorouridine-3'-phosphate
  modified_base 10: mod_base = OTHER; note = 2'-O-methyladenosine-3'-phosphate
  modified_base 11: mod_base = OTHER; note = 2'-O-methylguanosine-3'-phosphate
  modified_base 12: mod_base = OTHER; note = 2'-O-methylguanosine-3'-phosphate
  modified_base 13: mod_base = OTHER; note = 2'-O-methyladenosine-3'-phosphate
  modified_base 14: mod_base = OTHER; note = 2'-deoxy-2'-fluoroadenosine-3'-phosphate
  modified_base 15: mod_base = OTHER; note = 2'-O-methyladenosine-3'-phosphate
  modified_base 16: mod_base = OTHER; note = 2'-deoxy-2'-fluorouridine-3'-phosphate
  modified_base 17: mod_base = OTHER; note = 2'-O-methyladenosine-3'-phosphate
  modified_base 18: mod_base = OTHER; note = 2'-O-methylcytidine-3'-phosphate
  modified_base 19: mod_base = OTHER; note = 2'-O-methylcytidine-3'-phosphate
  modified_base 20: mod_base = OTHER; note = 2'-O-methyladenosine-3'-phosphate
  modified_base 21: mod_base = OTHER; note = 2'-O-methylguanosine-3'-phosphorothioate
  modified_base 22: mod_base = OTHER; note = 2'-O-methyladenosine-3'-phosphorothioate
  modified_base 23: mod_base = OTHER; note = 2'-O-methylguanosine
ttgtaccctaggaaataccagag

SEQ ID NO: 710 - RNA, 23 nt, synthetic construct
  source 1..23: mol_type = other RNA
  modified_base 1: mod_base = OTHER; note = 2'-O-methyluridine-3'-phosphorothioate
  modified_base 2: mod_base = OTHER; note = 2'-deoxy-2'-fluorouridine-3'-phosphorothioate
  modified_base 3: mod_base = OTHER; note = 2'-O-methylguanosine-3'-phosphate
  modified_base 4: mod_base = OTHER; note = 2'-deoxy-2'-fluorouridine-3'-phosphate
  modified_base 5: mod_base = OTHER; note = 2'-O-methyladenosine-3'-phosphate
  modified_base 6: mod_base = OTHER; note = 2'-deoxy-2'-fluorocytidine-3'-phosphate
  modified_base 7: mod_base = OTHER; note = 2'-O-methylcytidine-3'-phosphate
  modified_base 8: mod_base = OTHER; note = 2'-deoxy-2'-fluorocytidine-3'-phosphate
  modified_base 9: mod_base = OTHER; note = 2'-O-methyluridine-3'-phosphate
  modified_base 10: mod_base = OTHER; note = 2'-deoxy-2'-fluoroadenosine-3'-phosphate
  modified_base 11: mod_base = OTHER; note = 2'-O-methylguanosine-3'-phosphate
  modified_base 12: mod_base = OTHER; note = 2'-O-methylguanosine-3'-phosphate
  modified_base 13: mod_base = OTHER; note = 2'-O-methyladenosine-3'-phosphate
  modified_base 14: mod_base = OTHER; note = 2'-O-methyladenosine-3'-phosphate
  modified_base 15: mod_base = OTHER; note = 2'-O-methyladenosine-3'-phosphate
  modified_base 16: mod_base = OTHER; note = 2'-deoxy-2'-fluorouridine-3'-phosphate
  modified_base 17: mod_base = OTHER; note = 2'-O-methyladenosine-3'-phosphate
  modified_base 18: mod_base = OTHER; note = 2'-deoxy-2'-fluorocytidine-3'-phosphate
  modified_base 19: mod_base = OTHER; note = 2'-O-methylcytidine-3'-phosphate
  modified_base 20: mod_base = OTHER; note = 2'-deoxy-2'-fluoroadenosine-3'-phosphate
  modified_base 21: mod_base = OTHER; note = 2'-O-methylguanosine-3'-phosphorothioate
  modified_base 22: mod_base = OTHER; note = 2'-O-methyladenosine-3'-phosphorothioate
  modified_base 23: mod_base = OTHER; note = 2'-O-methylguanosine
ttgtaccctaggaaataccagag

SEQ ID NO: 711 - RNA, 23 nt, synthetic construct
  source 1..23: mol_type = other RNA
  modified_base 1: mod_base = OTHER; note = 2'-O-methyluridine-3'-phosphorothioate
  modified_base 2: mod_base = OTHER; note = 2'-deoxy-2'-fluorouridine-3'-phosphorothioate
  modified_base 3: mod_base = OTHER; note = 2'-O-methylguanosine-3'-phosphate
  modified_base 4: mod_base = OTHER; note = 2'-deoxy-2'-fluorouridine-3'-phosphate
  modified_base 5: mod_base = OTHER; note = 2'-O-methyladenosine-3'-phosphate
  modified_base 6: mod_base = OTHER; note = 2'-deoxy-2'-fluorocytidine-3'-phosphate
  modified_base 7: mod_base = OTHER; note = 2'-O-methylcytidine-3'-phosphate
  modified_base 8: mod_base = OTHER; note = 2'-deoxy-2'-fluorocytidine-3'-phosphate
  modified_base 9: mod_base = OTHER; note = 2'-O-methyluridine-3'-phosphate
  modified_base 10: mod_base = OTHER; note = 2'-deoxy-2'-fluoroadenosine-3'-phosphate
  modified_base 11: mod_base = OTHER; note = 2'-O-methylguanosine-3'-phosphate
  modified_base 12: mod_base = OTHER; note = 2'-O-methylguanosine-3'-phosphate
  modified_base 13: mod_base = OTHER; note = 2'-O-methyladenosine-3'-phosphate
  modified_base 14: mod_base = OTHER; note = 2'-deoxy-2'-fluoroadenosine-3'-phosphate
  modified_base 15: mod_base = OTHER; note = 2'-O-methyladenosine-3'-phosphate
  modified_base 16: mod_base = OTHER; note = 2'-deoxy-2'-fluorouridine-3'-phosphate
  modified_base 17: mod_base = OTHER; note = 2'-O-methyladenosine-3'-phosphate
  modified_base 18: mod_base = OTHER; note = 2'-deoxy-2'-fluorocytidine-3'-phosphate
  modified_base 19: mod_base = OTHER; note = 2'-O-methylcytidine-3'-phosphate
  modified_base 20: mod_base = OTHER; note = 2'-deoxy-2'-fluoroadenosine-3'-phosphate
  modified_base 21: mod_base = OTHER; note = 2'-O-methylguanosine-3'-phosphorothioate
  modified_base 22: mod_base = OTHER; note = 2'-O-methyladenosine-3'-phosphorothioate
  modified_base 23: mod_base = OTHER; note = 2'-O-methylguanosine
ttgtaccctaggaaataccagag

SEQ ID NO: 712 - RNA, 23 nt, synthetic construct
  source 1..23: mol_type = other RNA
  modified_base 1: mod_base = OTHER; note = 2'-O-methyluridine-3'-phosphorothioate
  modified_base 2: mod_base = OTHER; note = 2'-deoxy-2'-fluorouridine-3'-phosphorothioate
  modified_base 3: mod_base = OTHER; note = 2'-O-methylguanosine-3'-phosphate
  modified_base 4: mod_base = OTHER; note = 2'-O-methyluridine-3'-phosphate
  modified_base 5: mod_base = OTHER; note = 2'-O-methyladenosine-3'-phosphate
  modified_base 6: mod_base = OTHER; note = 2'-deoxy-2'-fluorocytidine-3'-phosphate
  modified_base 7: mod_base = OTHER; note = 2'-O-methylcytidine-3'-phosphate
  modified_base 8: mod_base = OTHER; note = 2'-O-methylcytidine-3'-phosphate
  modified_base 9: mod_base = OTHER; note = 2'-deoxy-2'-fluorouridine-3'-phosphate
  modified_base 10: mod_base = OTHER; note = 2'-O-methyladenosine-3'-phosphate
  modified_base 11: mod_base = OTHER; note = 2'-O-methylguanosine-3'-phosphate
  modified_base 12: mod_base = OTHER; note = 2'-O-methylguanosine-3'-phosphate
  modified_base 13: mod_base = OTHER; note = 2'-O-methyladenosine-3'-phosphate
  modified_base 14: mod_base = OTHER; note = 2'-deoxy-2'-fluoroadenosine-3'-phosphate
  modified_base 15: mod_base = OTHER; note = 2'-O-methyladenosine-3'-phosphate
  modified_base 16: mod_base = OTHER; note = 2'-deoxy-2'-fluorouridine-3'-phosphate
  modified_base 17: mod_base = OTHER; note = 2'-O-methyladenosine-3'-phosphate
  modified_base 18: mod_base = OTHER; note = 2'-O-methylcytidine-3'-phosphate
  modified_base 19: mod_base = OTHER; note = 2'-O-methylcytidine-3'-phosphate
  modified_base 20: mod_base = OTHER; note = 2'-O-methyladenosine-3'-phosphate
  modified_base 21: mod_base = OTHER; note = 2'-O-methylguanosine-3'-phosphorothioate
  modified_base 22: mod_base = OTHER; note = 2'-O-methyladenosine-3'-phosphorothioate
  modified_base 23: mod_base = OTHER; note = 2'-O-methylguanosine
ttgtaccctaggaaataccagag

SEQ ID NO: 713 - RNA, 23 nt, synthetic construct
  source 1..23: mol_type = other RNA
  modified_base 1: mod_base = OTHER; note = 2'-O-methyluridine-3'-phosphorothioate
  modified_base 2: mod_base = OTHER; note = 2'-deoxy-2'-fluorouridine-3'-phosphorothioate
  modified_base 3: mod_base = OTHER; note = 2'-O-methylguanosine-3'-phosphate
  modified_base 4: mod_base = OTHER; note = 2'-deoxy-2'-fluorouridine-3'-phosphate
  modified_base 5: mod_base = OTHER; note = 2'-O-methyladenosine-3'-phosphate
  modified_base 6: mod_base = OTHER; note = 2'-deoxy-2'-fluorocytidine-3'-phosphate
  modified_base 7: mod_base = OTHER; note = 2'-O-methylcytidine-3'-phosphate
  modified_base 8: mod_base = OTHER; note = 2'-deoxy-2'-fluorocytidine-3'-phosphate
  modified_base 9: mod_base = OTHER; note = 2'-O-methyluridine-3'-phosphate
  modified_base 10: mod_base = OTHER; note = 2'-deoxy-2'-fluoroadenosine-3'-phosphate
  modified_base 11: mod_base = OTHER; note = 2'-O-methylguanosine-3'-phosphate
  modified_base 12: mod_base = OTHER; note = 2'-O-methylguanosine-3'-phosphate
  modified_base 13: mod_base = OTHER; note = 2'-O-methyladenosine-3'-phosphate
  modified_base 14: mod_base = OTHER; note = 2'-deoxy-2'-fluoroadenosine-3'-phosphate
  modified_base 15: mod_base = OTHER; note = 2'-O-methyladenosine-3'-phosphate
  modified_base 16: mod_base = OTHER; note = 2'-deoxy-2'-fluorouridine-3'-phosphate
  modified_base 17: mod_base = OTHER; note = 2'-O-methyladenosine-3'-phosphate
  modified_base 18: mod_base = OTHER; note = 2'-deoxy-2'-fluorocytidine-3'-phosphate
  modified_base 19: mod_base = OTHER; note = 2'-O-methylcytidine-3'-phosphate
  modified_base 20: mod_base = OTHER; note = 2'-deoxy-2'-fluoroadenosine-3'-phosphate
  modified_base 21: mod_base = OTHER; note = 2'-O-methylguanosine-3'-phosphorothioate
  modified_base 22: mod_base = OTHER; note = 2'-O-methyladenosine-3'-phosphorothioate
  modified_base 23: mod_base = OTHER; note = 2'-O-methylguanosine
ttgtaccctaggaaataccagag

SEQ ID NO: 714 - RNA, 23 nt, synthetic construct
  source 1..23: mol_type = other RNA
  modified_base 1: mod_base = OTHER; note = 2'-O-methyluridine-3'-phosphorothioate
  modified_base 2: mod_base = OTHER; note = 2'-deoxy-2'-fluorouridine-3'-phosphorothioate
  modified_base 3: mod_base = OTHER; note = 2'-O-methylguanosine-3'-phosphate
  modified_base 4: mod_base = OTHER; note = 2'-O-methyluridine-3'-phosphate
  modified_base 5: mod_base = OTHER; note = 2'-O-methyladenosine-3'-phosphate
  modified_base 6: mod_base = OTHER; note = 2'-deoxy-2'-fluorocytidine-3'-phosphate
  modified_base 7: mod_base = OTHER; note = 2'-O-methylcytidine-3'-phosphate
  modified_base 8: mod_base = OTHER; note = 2'-O-methylcytidine-3'-phosphate
  modified_base 9: mod_base = OTHER; note = 2'-deoxy-2'-fluorouridine-3'-phosphate
  modified_base 10: mod_base = OTHER; note = 2'-O-methyladenosine-3'-phosphate
  modified_base 11: mod_base = OTHER; note = 2'-O-methylguanosine-3'-phosphate
  modified_base 12: mod_base = OTHER; note = 2'-O-methylguanosine-3'-phosphate
  modified_base 13: mod_base = OTHER; note = 2'-O-methyladenosine-3'-phosphate
  modified_base 14: mod_base = OTHER; note = 2'-deoxy-2'-fluoroadenosine-3'-phosphate
  modified_base 15: mod_base = OTHER; note = 2'-O-methyladenosine-3'-phosphate
  modified_base 16: mod_base = OTHER; note = 2'-deoxy-2'-fluorouridine-3'-phosphate
  modified_base 17: mod_base = OTHER; note = 2'-O-methyladenosine-3'-phosphate
  modified_base 18: mod_base = OTHER; note = 2'-O-methylcytidine-3'-phosphate
  modified_base 19: mod_base = OTHER; note = 2'-O-methylcytidine-3'-phosphate
  modified_base 20: mod_base = OTHER; note = 2'-O-methyladenosine-3'-phosphate
  modified_base 21: mod_base = OTHER; note = 2'-O-methylguanosine-3'-phosphorothioate
  modified_base 22: mod_base = OTHER; note = 2'-O-methyladenosine-3'-phosphorothioate
  modified_base 23: mod_base = OTHER; note = 2'-O-methylguanosine
ttgtaccctaggaaataccagag

SEQ ID NO: 715 - DNA, 21 bp, synthetic construct
  source 1..21: mol_type = other DNA
  modified_base 1: mod_base = OTHER; note = uridine-3'-phosphate
  modified_base 2: mod_base = OTHER; note = guanosine-3'-phosphate
  modified_base 3: mod_base = OTHER; note = adenosine-3'-phosphate
  modified_base 4: mod_base = OTHER; note = guanosine-3'-phosphate
  modified_base 5: mod_base = OTHER; note = cytidine-3'-phosphate
  modified_base 6: mod_base = OTHER; note = cytidine-3'-phosphate
  modified_base 7: mod_base = OTHER; note = adenosine-3'-phosphate
  modified_base 8: mod_base = OTHER; note = guanosine-3'-phosphate
  modified_base 9: mod_base = OTHER; note = adenosine-3'-phosphate
  modified_base 10: mod_base = OTHER; note = cytidine-3'-phosphate
  modified_base 11: mod_base = OTHER; note = cytidine-3'-phosphate
  modified_base 12: mod_base = OTHER; note = cytidine-3'-phosphate
  modified_base 13: mod_base = OTHER; note = adenosine-3'-phosphate
  modified_base 14: mod_base = OTHER; note = guanosine-3'-phosphate
  modified_base 15: mod_base = OTHER; note = uridine-3'-phosphate
  modified_base 16: mod_base = OTHER; note = cytidine-3'-phosphate
  modified_base 17: mod_base = OTHER; note = cytidine-3'-phosphate
  modified_base 18: mod_base = OTHER; note = adenosine-3'-phosphate
  modified_base 19: mod_base = OTHER; note = guanosine-3'-phosphate
  misc_feature 1..19: note = RNA
  misc_feature 20..21: note = DNA
tgagccagacccagtccagtt

SEQ ID NO: 716 - DNA, 21 bp, synthetic construct
  source 1..21: mol_type = other DNA
  modified_base 1: mod_base = OTHER; note = guanosine-3'-phosphate
  modified_base 2: mod_base = OTHER; note = adenosine-3'-phosphate
  modified_base 3: mod_base = OTHER; note = cytidine-3'-phosphate
  modified_base 4: mod_base = OTHER; note = cytidine-3'-phosphate
  modified_base 5: mod_base = OTHER; note = cytidine-3'-phosphate
  modified_base 6: mod_base = OTHER; note = adenosine-3'-phosphate
  modified_base 7: mod_base = OTHER; note = guanosine-3'-phosphate
  modified_base 8: mod_base = OTHER; note = uridine-3'-phosphate
  modified_base 9: mod_base = OTHER; note = cytidine-3'-phosphate
  modified_base 10: mod_base = OTHER; note = cytidine-3'-phosphate
  modified_base 11: mod_base = OTHER; note = adenosine-3'-phosphate
  modified_base 12: mod_base = OTHER; note = guanosine-3'-phosphate
  modified_base 13: mod_base = OTHER; note = cytidine-3'-phosphate
  modified_base 14: mod_base = OTHER; note = uridine-3'-phosphate
  modified_base 15: mod_base = OTHER; note = cytidine-3'-phosphate
  modified_base 16: mod_base = OTHER; note = uridine-3'-phosphate
  modified_base 17: mod_base = OTHER; note = guanosine-3'-phosphate
  modified_base 18: mod_base = OTHER; note = guanosine-3'-phosphate
  modified_base 19: mod_base = OTHER; note = uridine-3'-phosphate
  misc_feature 1..19: note = RNA
  misc_feature 20..21: note = DNA
gacccagtccagctctggttt

SEQ ID NO: 717 - DNA, 21 bp, synthetic construct
  source 1..21: mol_type = other DNA
  modified_base 1: mod_base = OTHER; note = cytidine-3'-phosphate
  modified_base 2: mod_base = OTHER; note = uridine-3'-phosphate
  modified_base 3: mod_base = OTHER; note = cytidine-3'-phosphate
  modified_base 4: mod_base = OTHER; note = uridine-3'-phosphate
  modified_base 5: mod_base = OTHER; note = guanosine-3'-phosphate
  modified_base 6: mod_base = OTHER; note = guanosine-3'-phosphate
  modified_base 7: mod_base = OTHER; note = uridine-3'-phosphate
  modified_base 8: mod_base = OTHER; note = guanosine-3'-phosphate
  modified_base 9: mod_base = OTHER; note = cytidine-3'-phosphate
  modified_base 10: mod_base = OTHER; note = cytidine-3'-phosphate
  modified_base 11: mod_base = OTHER; note = uridine-3'-phosphate
  modified_base 12: mod_base = OTHER; note = guanosine-3'-phosphate
  modified_base 13: mod_base = OTHER; note = cytidine-3'-phosphate
  modified_base 14: mod_base = OTHER; note = cytidine-3'-phosphate
  modified_base 15: mod_base = OTHER; note = cytidine-3'-phosphate
  modified_base 16: mod_base = OTHER; note = uridine-3'-phosphate
  modified_base 17: mod_base = OTHER; note = cytidine-3'-phosphate
  modified_base 18: mod_base = OTHER; note = uridine-3'-phosphate
  modified_base 19: mod_base = OTHER; note = guanosine-3'-phosphate
  misc_feature 1..19: note = RNA
  misc_feature 20..21: note = DNA
ctctggtgcctgccctctgtt

SEQ ID NO: 718 - DNA, 21 bp, synthetic construct
  source 1..21: mol_type = other DNA
  modified_base 1: mod_base = OTHER; note = guanosine-3'-phosphate
  modified_base 2: mod_base = OTHER; note = cytidine-3'-phosphate
  modified_base 3: mod_base = OTHER; note = cytidine-3'-phosphate
  modified_base 4: mod_base = OTHER; note = cytidine-3'-phosphate
  modified_base 5: mod_base = OTHER; note = uridine-3'-phosphate
  modified_base 6: mod_base = OTHER; note = cytidine-3'-phosphate
  modified_base 7: mod_base = OTHER; note = uridine-3'-phosphate
  modified_base 8: mod_base = OTHER; note = guanosine-3'-phosphate
  modified_base 9: mod_base = OTHER; note = guanosine-3'-phosphate
  modified_base 10: mod_base = OTHER; note = uridine-3'-phosphate
  modified_base 11: mod_base = OTHER; note = guanosine-3'-phosphate
  modified_base 12: mod_base = OTHER; note = cytidine-3'-phosphate
  modified_base 13: mod_base = OTHER; note = guanosine-3'-phosphate
  modified_base 14: mod_base = OTHER; note = adenosine-3'-phosphate
  modified_base 15: mod_base = OTHER; note = guanosine-3'-phosphate
  modified_base 16: mod_base = OTHER; note = cytidine-3'-phosphate
  modified_base 17: mod_base = OTHER; note = uridine-3'-phosphate
  modified_base 18: mod_base = OTHER; note = guanosine-3'-phosphate
  modified_base 19: mod_base = OTHER; note = adenosine-3'-phosphate
  misc_feature 1..19: note = RNA
  misc_feature 20..21: note = DNA
gccctctggtgcgagctgatt

SEQ ID NO: 719 - DNA, 21 bp, synthetic construct
  source 1..21: mol_type = other DNA
  modified_base 1: mod_base = OTHER; note = guanosine-3'-phosphate
  modified_base 2: mod_base = OTHER; note = guanosine-3'-phosphate
  modified_base 3: mod_base = OTHER; note = uridine-3'-phosphate
  modified_base 4: mod_base = OTHER; note = guanosine-3'-phosphate
  modified_base 5: mod_base = OTHER; note = cytidine-3'-phosphate
  modified_base 6: mod_base = OTHER; note = guanosine-3'-phosphate
  modified_base 7: mod_base = OTHER; note = adenosine-3'-phosphate
  modified_base 8: mod_base = OTHER; note = guanosine-3'-phosphate
  modified_base 9: mod_base = OTHER; note = cytidine-3'-phosphate
  modified_base 10: mod_base = OTHER; note = uridine-3'-phosphate
  modified_base 11: mod_base = OTHER; note = guanosine-3'-phosphate
  modified_base 12: mod_base = OTHER; note = adenosine-3'-phosphate
  modified_base 13: mod_base = OTHER; note = cytidine-3'-phosphate
  modified_base 14: mod_base = OTHER; note = cytidine-3'-phosphate
  modified_base 15: mod_base = OTHER; note = uridine-3'-phosphate
  modified_base 16: mod_base = OTHER; note = guanosine-3'-phosphate
  modified_base 17: mod_base = OTHER; note = adenosine-3'-phosphate
  modified_base 18: mod_base = OTHER; note = guanosine-3'-phosphate
  modified_base 19: mod_base = OTHER; note = adenosine-3'-phosphate
  misc_feature 1..19: note = RNA
  misc_feature 20..21: note = DNA
ggtgcgagctgacctgagatt

SEQ ID NO: 720 - DNA, 21 bp, synthetic construct
  source 1..21: mol_type = other DNA
  modified_base 1: mod_base = OTHER; note = uridine-3'-phosphate
  modified_base 2: mod_base = OTHER; note = guanosine-3'-phosphate
  modified_base 3: mod_base = OTHER; note = adenosine-3'-phosphate
  modified_base 4: mod_base = OTHER; note = cytidine-3'-phosphate
  modified_base 5: mod_base = OTHER; note = cytidine-3'-phosphate
  modified_base 6: mod_base = OTHER; note = uridine-3'-phosphate
  modified_base 7: mod_base = OTHER; note = guanosine-3'-phosphate
  modified_base 8: mod_base = OTHER; note = adenosine-3'-phosphate
  modified_base 9: mod_base = OTHER; note = guanosine-3'-phosphate
  modified_base 10: mod_base = OTHER; note = adenosine-3'-phosphate
  modified_base 11: mod_base = OTHER; note = uridine-3'-phosphate
  modified_base 12: mod_base = OTHER; note = guanosine-3'-phosphate
  modified_base 13: mod_base = OTHER; note = cytidine-3'-phosphate
  modified_base 14: mod_base = OTHER; note = adenosine-3'-phosphate
  modified_base 15: mod_base = OTHER; note = cytidine-3'-phosphate
  modified_base 16: mod_base = OTHER; note = uridine-3'-phosphate
  modified_base 17: mod_base = OTHER; note = uridine-3'-phosphate
  modified_base 18: mod_base = OTHER; note = cytidine-3'-phosphate
  modified_base 19: mod_base = OTHER; note = cytidine-3'-phosphate
  misc_feature 1..19: note = RNA
  misc_feature 20..21: note = DNA
tgacctgagatgcacttcctt

SEQ ID NO: 721 - DNA, 21 bp, synthetic construct
  source 1..21: mol_type = other DNA
  modified_base 1: mod_base = OTHER; note = uridine-3'-phosphate
  modified_base 2: mod_base = OTHER; note = guanosine-3'-phosphate
  modified_base 3: mod_base = OTHER; note = cytidine-3'-phosphate
  modified_base 4: mod_base = OTHER; note = adenosine-3'-phosphate
  modified_base 5: mod_base = OTHER; note = cytidine-3'-phosphate
  modified_base 6: mod_base = OTHER; note = uridine-3'-phosphate
  modified_base 7: mod_base = OTHER; note = uridine-3'-phosphate
  modified_base 8: mod_base = OTHER; note = cytidine-3'-phosphate
  modified_base 9: mod_base = OTHER; note = cytidine-3'-phosphate
  modified_base 10: mod_base = OTHER; note = cytidine-3'-phosphate
  modified_base 11: mod_base = OTHER; note = uridine-3'-phosphate
  modified_base 12: mod_base = OTHER; note = cytidine-3'-phosphate
  modified_base 13: mod_base = OTHER; note = cytidine-3'-phosphate
  modified_base 14: mod_base = OTHER; note = uridine-3'-phosphate
  modified_base 15: mod_base = OTHER; note = cytidine-3'-phosphate
  modified_base 16: mod_base = OTHER; note = uridine-3'-phosphate
  modified_base 17: mod_base = OTHER; note = guanosine-3'-phosphate
  modified_base 18: mod_base = OTHER; note = uridine-3'-phosphate
  modified_base 19: mod_base = OTHER; note = guanosine-3'-phosphate
  misc_feature 1..19: note = RNA
  misc_feature 20..21: note = DNA
tgcacttccctcctctgtgtt

SEQ ID NO: 722 - DNA, 21 bp, synthetic construct
  source 1..21: mol_type = other DNA
  modified_base 1: mod_base = OTHER; note = cytidine-3'-phosphate
  modified_base 2: mod_base = OTHER; note = uridine-3'-phosphate
  modified_base 3: mod_base = OTHER; note = guanosine-3'-phosphate
  modified_base 4: mod_base = OTHER; note = uridine-3'-phosphate
  modified_base 5: mod_base = OTHER; note = guanosine-3'-phosphate
  modified_base 6: mod_base = OTHER; note = adenosine-3'-phosphate
  modified_base 7: mod_base = OTHER; note = guanosine-3'-phosphate
  modified_base 8: mod_base = OTHER; note = cytidine-3'-phosphate
  modified_base 9: mod_base = OTHER; note = uridine-3'-phosphate
  modified_base 10: mod_base = OTHER; note = guanosine-3'-phosphate
  modified_base 11: mod_base = OTHER; note = uridine-3'-phosphate
  modified_base 12: mod_base = OTHER; note = cytidine-3'-phosphate
  modified_base 13: mod_base = OTHER; note = uridine-3'-phosphate
  modified_base 14: mod_base = OTHER; note = cytidine-3'-phosphate
  modified_base 15: mod_base = OTHER; note = guanosine-3'-phosphate
  modified_base 16: mod_base = OTHER; note = guanosine-3'-phosphate
  modified_base 17: mod_base = OTHER; note = cytidine-3'-phosphate
  modified_base 18: mod_base = OTHER; note = adenosine-3'-phosphate
  modified_base 19: mod_base = OTHER; note = cytidine-3'-phosphate
  misc_feature 1..19: note = RNA
  misc_feature 20..21: note = DNA
ctgtgagctgtctcggcactt

SEQ ID NO: 723 - DNA, 21 bp, synthetic construct
  source 1..21: mol_type = other DNA
  modified_base 1: mod_base = OTHER; note = guanosine-3'-phosphate
  modified_base 2: mod_base = OTHER; note = uridine-3'-phosphate
  modified_base 3: mod_base = OTHER; note = cytidine-3'-phosphate
  modified_base 4: mod_base = OTHER; note = uridine-3'-phosphate
  modified_base 5: mod_base = OTHER; note = cytidine-3'-phosphate
  modified_base 6: mod_base = OTHER; note = guanosine-3'-phosphate
  modified_base 7: mod_base = OTHER; note = guanosine-3'-phosphate
  modified_base 8: mod_base = OTHER; note = cytidine-3'-phosphate
  modified_base 9: mod_base = OTHER; note = adenosine-3'-phosphate
  modified_base 10: mod_base = OTHER; note = cytidine-3'-phosphate
  modified_base 11: mod_base = OTHER; note = cytidine-3'-phosphate
  modified_base 12: mod_base = OTHER; note = cytidine-3'-phosphate
  modified_base 13: mod_base = OTHER; note = adenosine-3'-phosphate
  modified_base 14: mod_base = OTHER; note = cytidine-3'-phosphate
  modified_base 15: mod_base = OTHER; note = uridine-3'-phosphate
  modified_base 16: mod_base = OTHER; note = uridine-3'-phosphate
  modified_base 17: mod_base = OTHER; note = guanosine-3'-phosphate
  modified_base 18: mod_base = OTHER; note = cytidine-3'-phosphate
  modified_base 19: mod_base = OTHER; note = adenosine-3'-phosphate
  misc_feature 1..19: note = RNA
  misc_feature 20..21: note = DNA
gtctcggcacccacttgcatt

SEQ ID NO: 724 - DNA, 21 bp, synthetic construct
  source 1..21: mol_type = other DNA
  modified_base 1: mod_base = OTHER; note = cytidine-3'-phosphate
  modified_base 2: mod_base = OTHER; note = cytidine-3'-phosphate
  modified_base 3: mod_base = OTHER; note = adenosine-3'-phosphate
  modified_base 4: mod_base = OTHER; note = cytidine-3'-phosphate
  modified_base 5: mod_base = OTHER; note = uridine-3'-phosphate
  modified_base 6: mod_base = OTHER; note = uridine-3'-phosphate
  modified_base 7: mod_base = OTHER; note = guanosine-3'-phosphate
  modified_base 8: mod_base = OTHER; note = cytidine-3'-phosphate
  modified_base 9: mod_base = OTHER; note = adenosine-3'-phosphate
  modified_base 10: mod_base = OTHER; note = guanosine-3'-phosphate
  modified_base 11: mod_base = OTHER; note = uridine-3'-phosphate
  modified_base 12: mod_base = OTHER; note = cytidine-3'-phosphate
  modified_base 13: mod_base = OTHER; note = adenosine-3'-phosphate
  modified_base 14: mod_base = OTHER; note = cytidine-3'-phosphate
  modified_base 15: mod_base = OTHER; note = uridine-3'-phosphate
  modified_base 16: mod_base = OTHER; note = guanosine-3'-phosphate
  modified_base 17: mod_base = OTHER; note = cytidine-3'-phosphate
  modified_base 18: mod_base = OTHER; note = cytidine-3'-phosphate
  modified_base 19: mod_base = OTHER; note = guanosine-3'-phosphate
  misc_feature 1..19: note = RNA
  misc_feature 20..21: note = DNA
ccacttgcagtcactgccgtt

SEQ ID NO: 725 - DNA, 21 bp, synthetic construct
  source 1..21: mol_type = other DNA
  modified_base 1: mod_base = OTHER; note = guanosine-3'-phosphate
  modified_base 2: mod_base = OTHER; note = uridine-3'-phosphate
  modified_base 3: mod_base = OTHER; note = cytidine-3'-phosphate
  modified_base 4: mod_base = OTHER; note = adenosine-3'-phosphate
  modified_base 5: mod_base = OTHER; note = cytidine-3'-phosphate
  modified_base 6: mod_base = OTHER; note = uridine-3'-phosphate
  modified_base 7: mod_base = OTHER; note = guanosine-3'-phosphate
  modified_base 8: mod_base = OTHER; note = cytidine-3'-phosphate
  modified_base 9: mod_base = OTHER; note = cytidine-3'-phosphate
  modified_base 10: mod_base = OTHER; note = guanosine-3'-phosphate
  modified_base 11: mod_base = OTHER; note = cytidine-3'-phosphate
  modified_base 12: mod_base = OTHER; note = cytidine-3'-phosphate
  modified_base 13: mod_base = OTHER; note = uridine-3'-phosphate
  modified_base 14: mod_base = OTHER; note = guanosine-3'-phosphate
  modified_base 15: mod_base = OTHER; note = adenosine-3'-phosphate
  modified_base 16: mod_base = OTHER; note = uridine-3'-phosphate
  modified_base 17: mod_base = OTHER; note = guanosine-3'-phosphate
  modified_base 18: mod_base = OTHER; note = uridine-3'-phosphate
  modified_base 19: mod_base = OTHER; note = uridine-3'-phosphate
  misc_feature 1..19: note = RNA
  misc_feature 20..21: note = DNA
gtcactgccgcctgatgtttt

SEQ ID NO: 726 - DNA, 21 bp, synthetic construct
  source 1..21: mol_type = other DNA
  modified_base 1: mod_base = OTHER; note = guanosine-3'-phosphate
  modified_base 2: mod_base = OTHER; note = cytidine-3'-phosphate
  modified_base 3: mod_base = OTHER; note = cytidine-3'-phosphate
  modified_base 4: mod_base = OTHER; note = uridine-3'-phosphate
  modified_base 5: mod_base = OTHER; note = guanosine-3'-phosphate
  modified_base 6: mod_base = OTHER; note = adenosine-3'-phosphate
  modified_base 7: mod_base = OTHER; note = uridine-3'-phosphate
  modified_base 8: mod_base = OTHER; note = guanosine-3'-phosphate
  modified_base 9: mod_base = OTHER; note = uridine-3'-phosphate
  modified_base 10: mod_base = OTHER; note = uridine-3'-phosphate
  modified_base 11: mod_base = OTHER; note = guanosine-3'-phosphate
  modified_base 12: mod_base = OTHER; note = uridine-3'-phosphate
  modified_base 13: mod_base = OTHER; note = uridine-3'-phosphate
  modified_base 14: mod_base = OTHER; note = adenosine-3'-phosphate
  modified_base 15: mod_base = OTHER; note = cytidine-3'-phosphate
  modified_base 16: mod_base = OTHER; note = uridine-3'-phosphate
  modified_base 17: mod_base = OTHER; note = cytidine-3'-phosphate
  modified_base 18: mod_base = OTHER; note = uridine-3'-phosphate
  modified_base 19: mod_base = OTHER; note = uridine-3'-phosphate
  misc_feature 1..19: note = RNA
  misc_feature 20..21: note = DNA
gcctgatgttgttactctttt

SEQ ID NO: 727 - DNA, 21 bp, synthetic construct
  source 1..21: mol_type = other DNA
  modified_base 1: mod_base = OTHER; note = uridine-3'-phosphate
  modified_base 2: mod_base = OTHER; note = uridine-3'-phosphate
  modified_base 3: mod_base = OTHER; note = adenosine-3'-phosphate
  modified_base 4: mod_base = OTHER; note = cytidine-3'-phosphate
  modified_base 5: mod_base = OTHER; note = uridine-3'-phosphate
  modified_base 6: mod_base = OTHER; note = cytidine-3'-phosphate
  modified_base 7: mod_base = OTHER; note = uridine-3'-phosphate
  modified_base 8: mod_base = OTHER; note = uridine-3'-phosphate
  modified_base 9: mod_base = OTHER; note = cytidine-3'-phosphate
  modified_base 10: mod_base = OTHER; note = cytidine-3'-phosphate
  modified_base 11: mod_base = OTHER; note = adenosine-3'-phosphate
  modified_base 12: mod_base = OTHER; note = cytidine-3'-phosphate
  modified_base 13: mod_base = OTHER; note = uridine-3'-phosphate
  modified_base 14: mod_base = OTHER; note = cytidine-3'-phosphate
  modified_base 15: mod_base = OTHER; note = cytidine-3'-phosphate
  modified_base 16: mod_base = OTHER; note = adenosine-3'-phosphate
  modified_base 17: mod_base = OTHER; note = adenosine-3'-phosphate
  modified_base 18: mod_base = OTHER; note = adenosine-3'-phosphate
  modified_base 19: mod_base = OTHER; note = adenosine-3'-phosphate
  misc_feature 1..19: note = RNA
  misc_feature 20..21: note = DNA
ttactcttccactccaaaatt

SEQ ID NO: 728 - DNA, 21 bp, synthetic construct
  source 1..21: mol_type = other DNA
  modified_base 1: mod_base = OTHER; note = adenosine-3'-phosphate
  modified_base 2: mod_base = OTHER; note = cytidine-3'-phosphate
  modified_base 3: mod_base = OTHER; note = uridine-3'-phosphate
  modified_base 4: mod_base = OTHER; note = cytidine-3'-phosphate
  modified_base 5: mod_base = OTHER; note = cytidine-3'-phosphate
  modified_base 6: mod_base = OTHER; note = adenosine-3'-phosphate
  modified_base 7: mod_base = OTHER; note = adenosine-3'-phosphate
  modified_base 8: mod_base = OTHER; note = adenosine-3'-phosphate
  modified_base 9: mod_base = OTHER; note = adenosine-3'-phosphate
  modified_base 10: mod_base = OTHER; note = guanosine-3'-phosphate
  modified_base 11: mod_base = OTHER; note = guanosine-3'-phosphate
  modified_base 12: mod_base = OTHER; note = adenosine-3'-phosphate
  modified_base 13: mod_base = OTHER; note = uridine-3'-phosphate
  modified_base 14: mod_base = OTHER; note = guanosine-3'-phosphate
  modified_base 15: mod_base = OTHER; note = cytidine-3'-phosphate
  modified_base 16: mod_base = OTHER; note = cytidine-3'-phosphate
  modified_base 17: mod_base = OTHER; note = cytidine-3'-phosphate
  modified_base 18: mod_base = OTHER; note = guanosine-3'-phosphate
  modified_base 19: mod_base = OTHER; note = uridine-3'-phosphate
  misc_feature 1..19: note = RNA
  misc_feature 20..21: note = DNA
actccaaaaggatgcccgttt

SEQ ID NO: 729 - DNA, 21 bp, synthetic construct
  source 1..21: mol_type = other DNA
  modified_base 1: mod_base = OTHER; note = uridine-3'-phosphate
  modified_base 2: mod_base = OTHER; note = guanosine-3'-phosphate
  modified_base 3: mod_base = OTHER; note = cytidine-3'-phosphate
  modified_base 4: mod_base = OTHER; note = cytidine-3'-phosphate
  modified_base 5: mod_base = OTHER; note = cytidine-3'-phosphate
  modified_base 6: mod_base = OTHER; note = guanosine-3'-phosphate
  modified_base 7: mod_base = OTHER; note = uridine-3'-phosphate
  modified_base 8: mod_base = OTHER; note = guanosine-3'-phosphate
  modified_base 9: mod_base = OTHER; note = guanosine-3'-phosphate
  modified_base 10: mod_base = OTHER; note = cytidine-3'-phosphate
  modified_base 11: mod_base = OTHER; note = cytidine-3'-phosphate
  modified_base 12: mod_base = OTHER; note = guanosine-3'-phosphate
  modified_base 13: mod_base = OTHER; note = adenosine-3'-phosphate
  modified_base 14: mod_base = OTHER; note = guanosine-3'-phosphate
  modified_base 15: mod_base = OTHER; note = guanosine-3'-phosphate
  modified_base 16: mod_base = OTHER; note = cytidine-3'-phosphate
  modified_base 17: mod_base = OTHER; note = cytidine-3'-phosphate
  modified_base 18: mod_base = OTHER; note = cytidine-3'-phosphate
  modified_base 19: mod_base = OTHER; note = cytidine-3'-phosphate
  misc_feature 1..19: note = RNA
  misc_feature 20..21: note = DNA
tgcccgtggccgaggcccctt

SEQ ID NO: 730 - DNA, 21 bp, synthetic construct
  source 1..21: mol_type = other DNA
  modified_base 1: mod_base = OTHER; note = uridine-3'-phosphate
  modified_base 2: mod_base = OTHER; note = guanosine-3'-phosphate
  modified_base 3: mod_base = OTHER; note = guanosine-3'-phosphate
  modified_base 4: mod_base = OTHER; note = cytidine-3'-phosphate
  modified_base 5: mod_base = OTHER; note = cytidine-3'-phosphate
  modified_base 6: mod_base = OTHER; note = guanosine-3'-phosphate
  modified_base 7: mod_base = OTHER; note = adenosine-3'-phosphate
  modified_base 8: mod_base = OTHER; note = guanosine-3'-phosphate
  modified_base 9: mod_base = OTHER; note = guanosine-3'-phosphate
  modified_base 10: mod_base = OTHER; note = cytidine-3'-phosphate
  modified_base 11: mod_base = OTHER; note = cytidine-3'-phosphate
  modified_base 12: mod_base = OTHER; note = cytidine-3'-phosphate
  modified_base 13: mod_base = OTHER; note = cytidine-3'-phosphate
  modified_base 14: mod_base = OTHER; note = cytidine-3'-phosphate
  modified_base 15: mod_base = OTHER; note = cytidine-3'-phosphate
  modified_base 16: mod_base = OTHER; note = adenosine-3'-phosphate
  modified_base 17: mod_base = OTHER; note = guanosine-3'-phosphate
  modified_base 18: mod_base = OTHER; note = guanosine-3'-phosphate
  modified_base 19: mod_base = OTHER; note = uridine-3'-phosphate
  misc_feature 1..19: note = RNA
  misc_feature 20..21: note = DNA
tggccgaggccccccaggttt

SEQ ID NO: 731 - DNA, 21 bp, synthetic construct
  source 1..21: mol_type = other DNA
  modified_base 1: mod_base = OTHER; note = cytidine-3'-phosphate
  modified_base 2: mod_base = OTHER; note = cytidine-3'-phosphate
  modified_base 3: mod_base = OTHER; note = adenosine-3'-phosphate
  modified_base 4: mod_base = OTHER; note = guanosine-3'-phosphate
  modified_base 5: mod_base = OTHER; note = guanosine-3'-phosphate
  modified_base 6: mod_base = OTHER; note = uridine-3'-phosphate
  modified_base 7: mod_base = OTHER; note = guanosine-3'-phosphate
  modified_base 8: mod_base = OTHER; note = guanosine-3'-phosphate
  modified_base 9: mod_base = OTHER; note = cytidine-3'-phosphate
  modified_base 10: mod_base = OTHER; note = uridine-3'-phosphate
  modified_base 11: mod_base = OTHER; note = guanosine-3'-phosphate
  modified_base 12: mod_base = OTHER; note = guanosine-3'-phosphate
  modified_base 13: mod_base = OTHER; note = cytidine-3'-phosphate
  modified_base 14: mod_base = OTHER; note = guanosine-3'-phosphate
  modified_base 15: mod_base = OTHER; note = guanosine-3'-phosphate
  modified_base 16: mod_base = OTHER; note = guanosine-3'-phosphate
  modified_base 17: mod_base = OTHER; note = cytidine-3'-phosphate
  modified_base 18: mod_base = OTHER; note = adenosine-3'-phosphate
  modified_base 19: mod_base = OTHER; note = guanosine-3'-phosphate
  misc_feature 1..19: note = RNA
  misc_feature 20..21: note = DNA
ccaggtggctggcgggcagtt

SEQ ID NO: 732 - DNA, 21 bp, synthetic construct
  source 1..21: mol_type = other DNA
  modified_base 1: mod_base = OTHER; note = guanosine-3'-phosphate
  modified_base 2: mod_base = OTHER; note = cytidine-3'-phosphate
  modified_base 3: mod_base = OTHER; note = guanosine-3'-phosphate
  modified_base 4: mod_base = OTHER; note = guanosine-3'-phosphate
  modified_base 5: mod_base = OTHER; note = guanosine-3'-phosphate
  modified_base 6: mod_base = OTHER; note = cytidine-3'-phosphate
  modified_base 7: mod_base = OTHER; note = adenosine-3'-phosphate
  modified_base 8: mod_base = OTHER; note = guanosine-3'-phosphate
  modified_base 9: mod_base = OTHER; note = guanosine-3'-phosphate
  modified_base 10: mod_base = OTHER; note = guanosine-3'-phosphate
  modified_base 11: mod_base = OTHER; note = guanosine-3'-phosphate
  modified_base 12: mod_base = OTHER; note = guanosine-3'-phosphate
  modified_base 13: mod_base = OTHER; note = adenosine-3'-phosphate
  modified_base 14: mod_base = OTHER; note = cytidine-3'-phosphate
  modified_base 15: mod_base = OTHER; note = guanosine-3'-phosphate
  modified_base 16: mod_base = OTHER; note = guanosine-3'-phosphate
  modified_base 17: mod_base = OTHER; note = adenosine-3'-phosphate
  modified_base 18: mod_base = OTHER; note = guanosine-3'-phosphate
  modified_base 19: mod_base = OTHER; note = guanosine-3'-phosphate
  misc_feature 1..19: note = RNA
  misc_feature 20..21: note = DNA
gcgggcagggggacggaggtt

SEQ ID NO: 733 - DNA, 21 bp, synthetic construct
  source 1..21: mol_type = other DNA
  modified_base 1: mod_base = OTHER; note = guanosine-3'-phosphate
  modified_base 2: mod_base = OTHER; note = guanosine-3'-phosphate
  modified_base 3: mod_base = OTHER; note = adenosine-3'-phosphate
  modified_base 4: mod_base = OTHER; note = cytidine-3'-phosphate
  modified_base 5: mod_base = OTHER; note = guanosine-3'-phosphate
  modified_base 6: mod_base = OTHER; note = guanosine-3'-phosphate
  modified_base 7: mod_base = OTHER; note = adenosine-3'-phosphate
  modified_base 8: mod_base = OTHER; note = guanosine-3'-phosphate
  modified_base 9: mod_base = OTHER; note = guanosine-3'-phosphate
  modified_base 10: mod_base = OTHER; note = uridine-3'-phosphate
  modified_base 11: mod_base = OTHER; note = guanosine-3'-phosphate
  modified_base 12: mod_base = OTHER; note = adenosine-3'-phosphate
  modified_base 13: mod_base = OTHER; note = uridine-3'-phosphate
  modified_base 14: mod_base = OTHER; note = guanosine-3'-phosphate
  modified_base 15: mod_base = OTHER; note = guanosine-3'-phosphate
  modified_base 16: mod_base = OTHER; note = cytidine-3'-phosphate
  modified_base 17: mod_base = OTHER; note = guanosine-3'-phosphate
  modified_base 18: mod_base = OTHER; note = adenosine-3'-phosphate
  modified_base 19: mod_base = OTHER; note = guanosine-3'-phosphate
  misc_feature 1..19: note = RNA
  misc_feature 20..21: note = DNA
ggacggaggtgatggcgagtt

SEQ ID NO: 734 - DNA, 21 bp, synthetic construct
  source 1..21: mol_type = other DNA
  modified_base 1: mod_base = OTHER; note = guanosine-3'-phosphate
  modified_base 2: mod_base = OTHER; note = uridine-3'-phosphate
  modified_base 3: mod_base = OTHER; note = guanosine-3'-phosphate
  modified_base 4: mod_base = OTHER; note = adenosine-3'-phosphate
  modified_base 5: mod_base = OTHER; note = uridine-3'-phosphate
  modified_base 6: mod_base = OTHER; note = guanosine-3'-phosphate
  modified_base 7: mod_base = OTHER; note = guanosine-3'-phosphate
  modified_base 8: mod_base = OTHER; note = cytidine-3'-phosphate
  modified_base 9: mod_base = OTHER; note = guanosine-3'-phosphate
  modified_base 10: mod_base = OTHER; note = adenosine-3'-phosphate
  modified_base 11: mod_base = OTHER; note = guanosine-3'-phosphate
  modified_base 12: mod_base = OTHER; note = guanosine-3'-phosphate
  modified_base 13: mod_base = OTHER; note = adenosine-3'-phosphate
  modified_base 14: mod_base = OTHER; note = adenosine-3'-phosphate
  modified_base 15: mod_base = OTHER; note = guanosine-3'-phosphate
  modified_base 16: mod_base = OTHER; note = cytidine-3'-phosphate
  modified_base 17: mod_base = OTHER; note = guanosine-3'-phosphate
  modified_base 18: mod_base = OTHER; note = guanosine-3'-phosphate
  modified_base 19: mod_base = OTHER; note = adenosine-3'-phosphate
  misc_feature 1..19: note = RNA
  misc_feature 20..21: note = DNA
gtgatggcgaggaagcggatt

SEQ ID NO: 735 - DNA, 21 bp, synthetic construct
  source 1..21: mol_type = other DNA
  modified_base 1: mod_base = OTHER; note = guanosine-3'-phosphate
  modified_base 2: mod_base = OTHER; note = adenosine-3'-phosphate
  modified_base 3: mod_base = OTHER; note = adenosine-3'-phosphate
  modified_base 4: mod_base = OTHER; note = guanosine-3'-phosphate
  modified_base 5: mod_base = OTHER; note = cytidine-3'-phosphate
  modified_base 6: mod_base = OTHER; note = guanosine-3'-phosphate
  modified_base 7: mod_base = OTHER; note = guanosine-3'-phosphate
  modified_base 8: mod_base = OTHER; note = adenosine-3'-phosphate
  modified_base 9: mod_base = OTHER; note = guanosine-3'-phosphate
  modified_base 10: mod_base = OTHER; note = cytidine-3'-phosphate
  modified_base 11: mod_base = OTHER; note = cytidine-3'-phosphate
  modified_base 12: mod_base = OTHER; note = guanosine-3'-phosphate
  modified_base 13: mod_base = OTHER; note = guanosine-3'-phosphate
  modified_base 14: mod_base = OTHER; note = adenosine-3'-phosphate
  modified_base 15: mod_base = OTHER; note = guanosine-3'-phosphate
  modified_base 16: mod_base = OTHER; note = guanosine-3'-phosphate
  modified_base 17: mod_base = OTHER; note = guanosine-3'-phosphate
  modified_base 18: mod_base = OTHER; note = guanosine-3'-phosphate
  modified_base 19: mod_base = OTHER; note = adenosine-3'-phosphate
  misc_feature 1..19: note = RNA
  misc_feature 20..21: note = DNA
gaagcggagccggaggggatt

SEQ ID NO: 736 - DNA, 21 bp, synthetic construct
  source 1..21: mol_type = other DNA
  modified_base 1: mod_base = OTHER; note = guanosine-3'-phosphate
  modified_base 2: mod_base = OTHER; note = cytidine-3'-phosphate
  modified_base 3: mod_base = OTHER; note = cytidine-3'-phosphate
  modified_base 4: mod_base = OTHER; note = guanosine-3'-phosphate
  modified_base 5: mod_base = OTHER; note = guanosine-3'-phosphate
  modified_base 6: mod_base = OTHER; note = adenosine-3'-phosphate
  modified_base 7: mod_base = OTHER; note = guanosine-3'-phosphate
  modified_base 8: mod_base = OTHER; note = guanosine-3'-phosphate
  modified_base 9: mod_base = OTHER; note = guanosine-3'-phosphate
  modified_base 10: mod_base = OTHER; note = guanosine-3'-phosphate
  modified_base 11: mod_base = OTHER; note = adenosine-3'-phosphate
  modified_base 12: mod_base = OTHER; note = uridine-3'-phosphate
  modified_base 13: mod_base = OTHER; note = guanosine-3'-phosphate
  modified_base 14: mod_base = OTHER; note = uridine-3'-phosphate
  modified_base 15: mod_base = OTHER; note = uridine-3'-phosphate
  modified_base 16: mod_base = OTHER; note = cytidine-3'-phosphate
  modified_base 17: mod_base = OTHER; note = adenosine-3'-phosphate
  modified_base 18: mod_base = OTHER; note = adenosine-3'-phosphate
  modified_base 19: mod_base = OTHER; note = guanosine-3'-phosphate
  misc_feature 1..19: note = RNA
  misc_feature 20..21: note = DNA
gccggaggggatgttcaagtt

SEQ ID NO: 737 - DNA, 21 bp, synthetic construct
  source 1..21: mol_type = other DNA
  modified_base 1: mod_base = OTHER; note = uridine-3'-phosphate
  modified_base 2: mod_base = OTHER; note = guanosine-3'-phosphate
  modified_base 3: mod_base = OTHER; note = uridine-3'-phosphate
  modified_base 4: mod_base = OTHER; note = uridine-3'-phosphate
  modified_base 5: mod_base = OTHER; note = cytidine-3'-phosphate
  modified_base 6: mod_base = OTHER; note = adenosine-3'-phosphate
  modified_base 7: mod_base = OTHER; note = adenosine-3'-phosphate
  modified_base 8: mod_base = OTHER; note = guanosine-3'-phosphate
  modified_base 9: mod_base = OTHER; note = guanosine-3'-phosphate
  modified_base 10: mod_base = OTHER; note = cytidine-3'-phosphate
  modified_base 11: mod_base = OTHER; note = cytidine-3'-phosphate
  modified_base 12: mod_base = OTHER; note = uridine-3'-phosphate
  modified_base 13: mod_base = OTHER; note = guanosine-3'-phosphate
  modified_base 14: mod_base = OTHER; note = uridine-3'-phosphate
  modified_base 15: mod_base = OTHER; note = guanosine-3'-phosphate
  modified_base 16: mod_base = OTHER; note = adenosine-3'-phosphate
  modified_base 17: mod_base = OTHER; note = guanosine-3'-phosphate
  modified_base 18: mod_base = OTHER; note = guanosine-3'-phosphate
  modified_base 19: mod_base = OTHER; note = adenosine-3'-phosphate
  misc_feature 1..19: note = RNA
  misc_feature 20..21: note = DNA
tgttcaaggcctgtgaggatt

SEQ ID NO: 738 - DNA, 21 bp, synthetic construct
  source 1..21: mol_type = other DNA
  modified_base 1: mod_base = OTHER; note = cytidine-3'-phosphate
  modified_base 2: mod_base = OTHER; note = uridine-3'-phosphate
  modified_base 3: mod_base = OTHER; note = guanosine-3'-phosphate
  modified_base 4: mod_base = OTHER; note = uridine-3'-phosphate
  modified_base 5: mod_base = OTHER; note = guanosine-3'-phosphate
  modified_base 6: mod_base = OTHER; note = adenosine-3'-phosphate
  modified_base 7: mod_base = OTHER; note = guanosine-3'-phosphate
  modified_base 8: mod_base = OTHER; note = guanosine-3'-phosphate
  modified_base 9: mod_base = OTHER; note = adenosine-3'-phosphate
  modified_base 10: mod_base = OTHER; note = cytidine-3'-phosphate
  modified_base 11: mod_base = OTHER; note = uridine-3'-phosphate
  modified_base 12: mod_base = OTHER; note = cytidine-3'-phosphate
  modified_base 13: mod_base = OTHER; note = cytidine-3'-phosphate
  modified_base 14: mod_base = OTHER; note = adenosine-3'-phosphate
  modified_base 15: mod_base = OTHER; note = adenosine-3'-phosphate
  modified_base 16: mod_base = OTHER; note = guanosine-3'-phosphate
  modified_base 17: mod_base = OTHER; note = adenosine-3'-phosphate
  modified_base 18: mod_base = OTHER; note = guanosine-3'-phosphate
  modified_base 19: mod_base = OTHER; note = adenosine-3'-phosphate
  misc_feature 1..19: note = RNA
  misc_feature 20..21: note = DNA
ctgtgaggactccaagagatt

SEQ ID NO: 739 - DNA, 21 bp, synthetic construct
  source 1..21: mol_type = other DNA
  modified_base 1: mod_base = OTHER; note = adenosine-3'-phosphate
  modified_base 2: mod_base = OTHER; note = cytidine-3'-phosphate
  modified_base 3: mod_base = OTHER; note = uridine-3'-phosphate
  modified_base 4: mod_base = OTHER; note = cytidine-3'-phosphate
  modified_base 5: mod_base = OTHER; note = cytidine-3'-phosphate
  modified_base 6: mod_base = OTHER; note = adenosine-3'-phosphate
  modified_base 7: mod_base = OTHER; note = adenosine-3'-phosphate
  modified_base 8: mod_base = OTHER; note = guanosine-3'-phosphate
  modified_base 9: mod_base = OTHER; note = adenosine-3'-phosphate
  modified_base 10: mod_base = OTHER; note = guanosine-3'-phosphate
  modified_base 11: mod_base = OTHER; note = adenosine-3'-phosphate
  modified_base 12: mod_base = OTHER; note = adenosine-3'-phosphate
  modified_base 13: mod_base = OTHER; note = adenosine-3'-phosphate
  modified_base 14: mod_base = OTHER; note = adenosine-3'-phosphate
  modified_base 15: mod_base = OTHER; note = guanosine-3'-phosphate
  modified_base 16: mod_base = OTHER; note = cytidine-3'-phosphate
  modified_base 17: mod_base = OTHER; note = cytidine-3'-phosphate
  modified_base 18: mod_base = OTHER; note = cytidine-3'-phosphate
  modified_base 19: mod_base = OTHER; note = guanosine-3'-phosphate
  misc_feature 1..19: note = RNA
  misc_feature 20..21: note = DNA
actccaagagaaaagcccgtt

SEQ ID NO: 740 - DNA, 21 bp, synthetic construct
  source 1..21: mol_type = other DNA
  modified_base 1: mod_base = OTHER; note = guanosine-3'-phosphate
  modified_base 2: mod_base = OTHER; note = cytidine-3'-phosphate
  modified_base 3: mod_base = OTHER; note = cytidine-3'-phosphate
  modified_base 4: mod_base = OTHER; note = cytidine-3'-phosphate
  modified_base 5: mod_base = OTHER; note = guanosine-3'-phosphate
  modified_base 6: mod_base = OTHER; note = guanosine-3'-phosphate
  modified_base 7: mod_base = OTHER; note = guanosine-3'-phosphate
  modified_base 8: mod_base = OTHER; note = guanosine-3'-phosphate
  modified_base 9: mod_base = OTHER; note = cytidine-3'-phosphate
  modified_base 10: mod_base = OTHER; note = uridine-3'-phosphate
  modified_base 11: mod_base = OTHER; note = adenosine-3'-phosphate
  modified_base 12: mod_base = OTHER; note = cytidine-3'-phosphate
  modified_base 13: mod_base = OTHER; note = cytidine-3'-phosphate
  modified_base 14: mod_base = OTHER; note = uridine-3'-phosphate
  modified_base 15: mod_base = OTHER; note = cytidine-3'-phosphate
  modified_base 16: mod_base = OTHER; note = cytidine-3'-phosphate
  modified_base 17: mod_base = OTHER; note = guanosine-3'-phosphate
  modified_base 18: mod_base = OTHER; note = cytidine-3'-phosphate
  modified_base 19: mod_base = OTHER; note = cytidine-3'-phosphate
  misc_feature 1..19: note = RNA
  misc_feature 20..21: note = DNA
gcccggggctacctccgcctt

SEQ ID NO: 741 - DNA, 21 bp, synthetic construct
  source 1..21: mol_type = other DNA
  modified_base 1: mod_base = OTHER; note = adenosine-3'-phosphate
  modified_base 2: mod_base = OTHER; note = cytidine-3'-phosphate
  modified_base 3: mod_base = OTHER; note = cytidine-3'-phosphate
  modified_base 4: mod_base = OTHER; note = uridine-3'-phosphate
  modified_base 5: mod_base = OTHER; note = cytidine-3'-phosphate
  modified_base 6: mod_base = OTHER; note = cytidine-3'-phosphate
  modified_base 7: mod_base = OTHER; note = guanosine-3'-phosphate
  modified_base 8: mod_base = OTHER; note = cytidine-3'-phosphate
  modified_base 9: mod_base = OTHER; note = cytidine-3'-phosphate
  modified_base 10: mod_base = OTHER; note = uridine-3'-phosphate
  modified_base 11: mod_base = OTHER; note = guanosine-3'-phosphate
  modified_base 12: mod_base = OTHER; note = guanosine-3'-phosphate
  modified_base 13: mod_base = OTHER; note = uridine-3'-phosphate
  modified_base 14: mod_base = OTHER; note = guanosine-3'-phosphate
  modified_base 15: mod_base = OTHER; note = cytidine-3'-phosphate
  modified_base 16: mod_base = OTHER; note = cytidine-3'-phosphate
  modified_base 17: mod_base = OTHER; note = cytidine-3'-phosphate
  modified_base 18: mod_base = OTHER; note = cytidine-3'-phosphate
  modified_base 19: mod_base = OTHER; note = uridine-3'-phosphate
  misc_feature 1..19: note = RNA
  misc_feature 20..21: note = DNA
acctccgcctggtgccccttt

SEQ ID NO: 742 - DNA, 21 bp, synthetic construct
  source 1..21: mol_type = other DNA
  modified_base 1: mod_base = OTHER; note = guanosine-3'-phosphate
  modified_base 2: mod_base = OTHER; note = cytidine-3'-phosphate
  modified_base 3: mod_base = OTHER; note = cytidine-3'-phosphate
  modified_base 4: mod_base = OTHER; note = uridine-3'-phosphate
  modified_base 5: mod_base = OTHER; note = guanosine-3'-phosphate
  modified_base 6: mod_base = OTHER; note = guanosine-3'-phosphate
  modified_base 7: mod_base = OTHER; note = uridine-3'-phosphate
  modified_base 8: mod_base = OTHER; note = guanosine-3'-phosphate
  modified_base 9: mod_base = OTHER; note = cytidine-3'-phosphate
  modified_base 10: mod_base = OTHER; note = cytidine-3'-phosphate
  modified_base 11: mod_base = OTHER; note = cytidine-3'-phosphate
  modified_base 12: mod_base = OTHER; note = cytidine-3'-phosphate
  modified_base 13: mod_base = OTHER; note = uridine-3'-phosphate
  modified_base 14: mod_base = OTHER; note = guanosine-3'-phosphate
  modified_base 15: mod_base = OTHER; note = uridine-3'-phosphate
  modified_base 16: mod_base = OTHER; note = uridine-3'-phosphate
  modified_base 17: mod_base = OTHER; note = uridine-3'-phosphate
  modified_base 18: mod_base = OTHER; note = guanosine-3'-phosphate
  modified_base 19: mod_base = OTHER; note = uridine-3'-phosphate
  misc_feature 1..19: note = RNA
  misc_feature 20..21: note = DNA
gcctggtgcccctgtttgttt

SEQ ID NO: 743 - DNA, 21 bp, synthetic construct
  source 1..21: mol_type = other DNA
  modified_base 1: mod_base = OTHER; note = uridine-3'-phosphate
  modified_base 2: mod_base = OTHER; note = guanosine-3'-phosphate
  modified_base 3: mod_base = OTHER; note = uridine-3'-phosphate
  modified_base 4: mod_base = OTHER; note = uridine-3'-phosphate
  modified_base 5: mod_base = OTHER; note = uridine-3'-phosphate
  modified_base 6: mod_base = OTHER; note = guanosine-3'-phosphate
  modified_base 7: mod_base = OTHER; note = uridine-3'-phosphate
  modified_base 8: mod_base = OTHER; note = guanosine-3'-phosphate
  modified_base 9: mod_base = OTHER; note = cytidine-3'-phosphate
  modified_base 10: mod_base = OTHER; note = uridine-3'-phosphate
  modified_base 11: mod_base = OTHER; note = guanosine-3'-phosphate
  modified_base 12: mod_base = OTHER; note = cytidine-3'-phosphate
  modified_base 13: mod_base = OTHER; note = uridine-3'-phosphate
  modified_base 14: mod_base = OTHER; note = guanosine-3'-phosphate
  modified_base 15: mod_base = OTHER; note = guanosine-3'-phosphate
  modified_base 16: mod_base = OTHER; note = cytidine-3'-phosphate
  modified_base 17: mod_base = OTHER; note = cytidine-3'-phosphate
  modified_base 18: mod_base = OTHER; note = cytidine-3'-phosphate
  modified_base 19: mod_base = OTHER; note = uridine-3'-phosphate
  misc_feature 1..19: note = RNA
  misc_feature 20..21: note = DNA
tgtttgtgctgctggcccttt

SEQ ID NO: 744 - DNA, 21 bp, synthetic construct
  source 1..21: mol_type = other DNA
  modified_base 1: mod_base = OTHER; note = uridine-3'-phosphate
  modified_base 2: mod_base = OTHER; note = guanosine-3'-phosphate
  modified_base 3: mod_base = OTHER; note = cytidine-3'-phosphate
  modified_base 4: mod_base = OTHER; note = uridine-3'-phosphate
  modified_base 5: mod_base = OTHER; note = guanosine-3'-phosphate
  modified_base 6: mod_base = OTHER; note = guanosine-3'-phosphate
  modified_base 7: mod_base = OTHER; note = cytidine-3'-phosphate
  modified_base 8: mod_base = OTHER; note = cytidine-3'-phosphate
  modified_base 9: mod_base = OTHER; note = cytidine-3'-phosphate
  modified_base 10: mod_base = OTHER; note = uridine-3'-phosphate
  modified_base 11: mod_base = OTHER; note = guanosine-3'-phosphate
  modified_base 12: mod_base = OTHER; note = cytidine-3'-phosphate
  modified_base 13: mod_base = OTHER; note = uridine-3'-phosphate
  modified_base 14: mod_base = OTHER; note = cytidine-3'-phosphate
  modified_base 15: mod_base = OTHER; note = guanosine-3'-phosphate
  modified_base 16: mod_base = OTHER; note = uridine-3'-phosphate
  modified_base 17: mod_base = OTHER; note = guanosine-3'-phosphate
  modified_base 18: mod_base = OTHER; note = cytidine-3'-phosphate
  modified_base 19: mod_base = OTHER; note = uridine-3'-phosphate
  misc_feature 1..19: note = RNA
  misc_feature 20..21: note = DNA
tgctggccctgctcgtgcttt

SEQ ID NO: 745 - DNA, 21 bp, synthetic construct
  source 1..21: mol_type = other DNA
  modified_base 1: mod_base = OTHER; note = guanosine-3'-phosphate
  modified_base 2: mod_base = OTHER; note = cytidine-3'-phosphate
  modified_base 3: mod_base = OTHER; note = uridine-3'-phosphate
  modified_base 4: mod_base = OTHER; note = cytidine-3'-phosphate
  modified_base 5: mod_base = OTHER; note = guanosine-3'-phosphate
  modified_base 6: mod_base = OTHER; note = uridine-3'-phosphate
  modified_base 7: mod_base = OTHER; note = guanosine-3'-phosphate
  modified_base 8: mod_base = OTHER; note = cytidine-3'-phosphate
  modified_base 9: mod_base = OTHER; note = uridine-3'-phosphate
  modified_base 10: mod_base = OTHER; note = guanosine-3'-phosphate
  modified_base 11: mod_base = OTHER; note = guanosine-3'-phosphate
  modified_base 12: mod_base = OTHER; note = cytidine-3'-phosphate
  modified_base 13: mod_base = OTHER; note = uridine-3'-phosphate
  modified_base 14: mod_base = OTHER; note = uridine-3'-phosphate
  modified_base 15: mod_base = OTHER; note = cytidine-3'-phosphate
  modified_base 16: mod_base = OTHER; note = guanosine-3'-phosphate
  modified_base 17: mod_base = OTHER; note = guanosine-3'-phosphate
  modified_base 18: mod_base = OTHER; note = cytidine-3'-phosphate
  modified_base 19: mod_base = OTHER; note = guanosine-3'-phosphate
  misc_feature 1..19: note = RNA
  misc_feature 20..21: note = DNA
gctcgtgctggcttcggcgtt

SEQ ID NO: 746 - DNA, 21 bp, synthetic construct
  source 1..21: mol_type = other DNA
  modified_base 1: mod_base = OTHER; note = uridine-3'-phosphate
  modified_base 2: mod_base = OTHER; note = cytidine-3'-phosphate
  modified_base 3: mod_base = OTHER; note = guanosine-3'-phosphate
  modified_base 4: mod_base = OTHER; note = guanosine-3'-phosphate
  modified_base 5: mod_base = OTHER; note = cytidine-3'-phosphate
  modified_base 6: mod_base = OTHER; note = guanosine-3'-phosphate
  modified_base 7: mod_base = OTHER; note = guanosine-3'-phosphate
  modified_base 8: mod_base = OTHER; note = guanosine-3'-phosphate
  modified_base 9: mod_base = OTHER; note = guanosine-3'-phosphate
  modified_base 10: mod_base = OTHER; note = guanosine-3'-phosphate
  modified_base 11: mod_base = OTHER; note = uridine-3'-phosphate
  modified_base 12: mod_base = OTHER; note = guanosine-3'-phosphate
  modified_base 13: mod_base = OTHER; note = cytidine-3'-phosphate
  modified_base 14: mod_base = OTHER; note = uridine-3'-phosphate
  modified_base 15: mod_base = OTHER; note = adenosine-3'-phosphate
  modified_base 16: mod_base = OTHER; note = cytidine-3'-phosphate
  modified_base 17: mod_base = OTHER; note = uridine-3'-phosphate
  modified_base 18: mod_base = OTHER; note = cytidine-3'-phosphate
  modified_base 19: mod_base = OTHER; note = uridine-3'-phosphate
  misc_feature 1..19: note = RNA
  misc_feature 20..21: note = DNA
tcggcgggggtgctactcttt

SEQ ID NO: 747 - DNA, 21 bp, synthetic construct
  source 1..21: mol_type = other DNA
  modified_base 1: mod_base = OTHER; note = cytidine-3'-phosphate
  modified_base 2: mod_base = OTHER; note = guanosine-3'-phosphate
  modified_base 3: mod_base = OTHER; note = guanosine-3'-phosphate
  modified_base 4: mod_base = OTHER; note = cytidine-3'-phosphate
  modified_base 5: mod_base = OTHER; note = guanosine-3'-phosphate
  modified_base 6: mod_base = OTHER; note = guanosine-3'-phosphate
  modified_base 7: mod_base = OTHER; note = guanosine-3'-phosphate
  modified_base 8: mod_base = OTHER; note = guanosine-3'-phosphate
  modified_base 9: mod_base = OTHER; note = guanosine-3'-phosphate
  modified_base 10: mod_base = OTHER; note = uridine-3'-phosphate
  modified_base 11: mod_base = OTHER; note = guanosine-3'-phosphate
  modified_base 12: mod_base = OTHER; note = cytidine-3'-phosphate
  modified_base 13: mod_base = OTHER; note = uridine-3'-phosphate
  modified_base 14: mod_base = OTHER; note = adenosine-3'-phosphate
  modified_base 15: mod_base = OTHER; note = cytidine-3'-phosphate
  modified_base 16: mod_base = OTHER; note = uridine-3'-phosphate
  modified_base 17: mod_base = OTHER; note = cytidine-3'-phosphate
  modified_base 18: mod_base = OTHER; note = uridine-3'-phosphate
  modified_base 19: mod_base = OTHER; note = guanosine-3'-phosphate
  misc_feature 1..19: note = RNA
  misc_feature 20..21: note = DNA
cggcgggggtgctactctgtt

SEQ ID NO: 748 - DNA, 21 bp, synthetic construct
  source 1..21: mol_type = other DNA
  modified_base 1: mod_base = OTHER; note = guanosine-3'-phosphate
  modified_base 2: mod_base = OTHER; note = guanosine-3'-phosphate
  modified_base 3: mod_base = OTHER; note = cytidine-3'-phosphate
  modified_base 4: mod_base = OTHER; note = guanosine-3'-phosphate
  modified_base 5: mod_base = OTHER; note = guanosine-3'-phosphate
  modified_base 6: mod_base = OTHER; note = guanosine-3'-phosphate
  modified_base 7: mod_base = OTHER; note = guanosine-3'-phosphate
  modified_base 8: mod_base = OTHER; note = guanosine-3'-phosphate
  modified_base 9: mod_base = OTHER; note = uridine-3'-phosphate
  modified_base 10: mod_base = OTHER; note = guanosine-3'-phosphate
  modified_base 11: mod_base = OTHER; note = cytidine-3'-phosphate
  modified_base 12: mod_base = OTHER; note = uridine-3'-phosphate
  modified_base 13: mod_base = OTHER; note = adenosine-3'-phosphate
  modified_base 14: mod_base = OTHER; note = cytidine-3'-phosphate
  modified_base 15: mod_base = OTHER; note = uridine-3'-phosphate
  modified_base 16: mod_base = OTHER; note = cytidine-3'-phosphate
  modified_base 17: mod_base = OTHER; note = uridine-3'-phosphate
  modified_base 18: mod_base = OTHER; note = guanosine-3'-phosphate
  modified_base 19: mod_base = OTHER; note = guanosine-3'-phosphate
  misc_feature 1..19: note = RNA
  misc_feature 20..21: note = DNA
ggcgggggtgctactctggtt

SEQ ID NO: 749 - DNA, 21 bp, synthetic construct
  source 1..21: mol_type = other DNA
  modified_base 1: mod_base = OTHER; note = guanosine-3'-phosphate
  modified_base 2: mod_base = OTHER; note = cytidine-3'-phosphate
  modified_base 3: mod_base = OTHER; note = guanosine-3'-phosphate
  modified_base 4: mod_base = OTHER; note = guanosine-3'-phosphate
  modified_base 5: mod_base = OTHER; note = guanosine-3'-phosphate
  modified_base 6: mod_base = OTHER; note = guanosine-3'-phosphate
  modified_base 7: mod_base = OTHER; note = guanosine-3'-phosphate
  modified_base 8: mod_base = OTHER; note = uridine-3'-phosphate
  modified_base 9: mod_base = OTHER; note = guanosine-3'-phosphate
  modified_base 10: mod_base = OTHER; note = cytidine-3'-phosphate
  modified_base 11: mod_base = OTHER; note = uridine-3'-phosphate
  modified_base 12: mod_base = OTHER; note = adenosine-3'-phosphate
  modified_base 13: mod_base = OTHER; note = cytidine-3'-phosphate
  modified_base 14: mod_base = OTHER; note = uridine-3'-phosphate
  modified_base 15: mod_base = OTHER; note = cytidine-3'-phosphate
  modified_base 16: mod_base = OTHER; note = uridine-3'-phosphate
  modified_base 17: mod_base = OTHER; note = guanosine-3'-phosphate
  modified_base 18: mod_base = OTHER; note = guanosine-3'-phosphate
  modified_base 19: mod_base = OTHER; note = uridine-3'-phosphate
  misc_feature 1..19: note = RNA
  misc_feature 20..21: note = DNA
gcgggggtgctactctggttt

SEQ ID NO: 750 - DNA, 21 bp, synthetic construct
  source 1..21: mol_type = other DNA
  modified_base 1: mod_base = OTHER; note = cytidine-3'-phosphate
  modified_base 2: mod_base = OTHER; note = guanosine-3'-phosphate
  modified_base 3: mod_base = OTHER; note = guanosine-3'-phosphate
  modified_base 4: mod_base = OTHER; note = guanosine-3'-phosphate
  modified_base 5: mod_base = OTHER; note = guanosine-3'-phosphate
  modified_base 6: mod_base = OTHER; note = guanosine-3'-phosphate
  modified_base 7: mod_base = OTHER; note = uridine-3'-phosphate
  modified_base 8: mod_base = OTHER; note = guanosine-3'-phosphate
  modified_base 9: mod_base = OTHER; note = cytidine-3'-phosphate
  modified_base 10: mod_base = OTHER; note = uridine-3'-phosphate
  modified_base 11: mod_base = OTHER; note = adenosine-3'-phosphate
  modified_base 12: mod_base = OTHER; note = cytidine-3'-phosphate
  modified_base 13: mod_base = OTHER; note = uridine-3'-phosphate
  modified_base 14: mod_base = OTHER; note = cytidine-3'-phosphate
  modified_base 15: mod_base = OTHER; note = uridine-3'-phosphate
  modified_base 16: mod_base = OTHER; note = guanosine-3'-phosphate
  modified_base 17: mod_base = OTHER; note = guanosine-3'-phosphate
  modified_base 18: mod_base = OTHER; note = uridine-3'-phosphate
  modified_base 19: mod_base = OTHER; note = adenosine-3'-phosphate
  misc_feature 1..19: note = RNA
  misc_feature 20..21: note = DNA
cgggggtgctactctggtatt

SEQ ID NO: 751 - DNA, 21 bp, synthetic construct
  source 1..21: mol_type = other DNA
  modified_base 1: mod_base = OTHER; note = guanosine-3'-phosphate
  modified_base 2: mod_base = OTHER; note = guanosine-3'-phosphate
  modified_base 3: mod_base = OTHER; note = guanosine-3'-phosphate
  modified_base 4: mod_base = OTHER; note = guanosine-3'-phosphate
  modified_base 5: mod_base = OTHER; note = guanosine-3'-phosphate
  modified_base 6: mod_base = OTHER; note = uridine-3'-phosphate
  modified_base 7: mod_base = OTHER; note = guanosine-3'-phosphate
  modified_base 8: mod_base = OTHER; note = cytidine-3'-phosphate
  modified_base 9: mod_base = OTHER; note = uridine-3'-phosphate
  modified_base 10: mod_base = OTHER; note = adenosine-3'-phosphate
  modified_base 11: mod_base = OTHER; note = cytidine-3'-phosphate
  modified_base 12: mod_base = OTHER; note = uridine-3'-phosphate
  modified_base 13: mod_base = OTHER; note = cytidine-3'-phosphate
  modified_base 14: mod_base = OTHER; note = uridine-3'-phosphate
  modified_base 15: mod_base = OTHER; note = guanosine-3'-phosphate
  modified_base 16: mod_base = OTHER; note = guanosine-3'-phosphate
  modified_base 17: mod_base = OTHER; note = uridine-3'-phosphate
  modified_base 18: mod_base = OTHER; note = adenosine-3'-phosphate
  modified_base 19: mod_base = OTHER; note = uridine-3'-phosphate
  misc_feature 1..19: note = RNA
  misc_feature 20..21: note = DNA
gggggtgctactctggtattt

SEQ ID NO: 752 - DNA, 21 bp, synthetic construct
  source 1..21: mol_type = other DNA
  modified_base 1: mod_base = OTHER; note = guanosine-3'-phosphate
  modified_base 2: mod_base = OTHER; note = guanosine-3'-phosphate
  modified_base 3: mod_base = OTHER; note = guanosine-3'-phosphate
  modified_base 4: mod_base = OTHER; note = uridine-3'-phosphate
  modified_base 5: mod_base = OTHER; note = guanosine-3'-phosphate
  modified_base 6: mod_base = OTHER; note = cytidine-3'-phosphate
  modified_base 7: mod_base = OTHER; note = uridine-3'-phosphate
  modified_base 8: mod_base = OTHER; note = adenosine-3'-phosphate
  modified_base 9: mod_base = OTHER; note = cytidine-3'-phosphate
  modified_base 10: mod_base = OTHER; note = uridine-3'-phosphate
  modified_base 11: mod_base = OTHER; note = cytidine-3'-phosphate
  modified_base 12: mod_base = OTHER; note = uridine-3'-phosphate
  modified_base 13: mod_base = OTHER; note = guanosine-3'-phosphate
  modified_base 14: mod_base = OTHER; note = guanosine-3'-phosphate
  modified_base 15: mod_base = OTHER; note = uridine-3'-phosphate
  modified_base 16: mod_base = OTHER; note = adenosine-3'-phosphate
  modified_base 17: mod_base = OTHER; note = uridine-3'-phosphate
  modified_base 18: mod_base = OTHER; note = uridine-3'-phosphate
  modified_base 19: mod_base = OTHER; note = uridine-3'-phosphate
  misc_feature 1..19: note = RNA
  misc_feature 20..21: note = DNA
gggtgctactctggtattttt

SEQ ID NO: 753 - DNA, 21 bp, synthetic construct
  source 1..21: mol_type = other DNA
  modified_base 1: mod_base = OTHER; note = guanosine-3'-phosphate
  modified_base 2: mod_base = OTHER; note = guanosine-3'-phosphate
  modified_base 3: mod_base = OTHER; note = uridine-3'-phosphate
  modified_base 4: mod_base = OTHER; note = guanosine-3'-phosphate
  modified_base 5: mod_base = OTHER; note = cytidine-3'-phosphate
  modified_base 6: mod_base = OTHER; note = uridine-3'-phosphate
  modified_base 7: mod_base = OTHER; note = adenosine-3'-phosphate
  modified_base 8: mod_base = OTHER; note = cytidine-3'-phosphate
  modified_base 9: mod_base = OTHER; note = uridine-3'-phosphate
  modified_base 10: mod_base = OTHER; note = cytidine-3'-phosphate
  modified_base 11: mod_base = OTHER; note = uridine-3'-phosphate
  modified_base 12: mod_base = OTHER; note = guanosine-3'-phosphate
  modified_base 13: mod_base = OTHER; note = guanosine-3'-phosphate
  modified_base 14: mod_base = OTHER; note = uridine-3'-phosphate
  modified_base 15: mod_base = OTHER; note = adenosine-3'-phosphate
  modified_base 16: mod_base = OTHER; note = uridine-3'-phosphate
  modified_base 17: mod_base = OTHER; note = uridine-3'-phosphate
  modified_base 18: mod_base = OTHER; note = uridine-3'-phosphate
  modified_base 19: mod_base = OTHER; note = cytidine-3'-phosphate
  misc_feature 1..19: note = RNA
  misc_feature 20..21: note = DNA
ggtgctactctggtatttctt

SEQ ID NO: 754 - DNA, 21 bp, synthetic construct
  source 1..21: mol_type = other DNA
  modified_base 1: mod_base = OTHER; note = guanosine-3'-phosphate
  modified_base 2: mod_base = OTHER; note = uridine-3'-phosphate
  modified_base 3: mod_base = OTHER; note = guanosine-3'-phosphate
  modified_base 4: mod_base = OTHER; note = cytidine-3'-phosphate
  modified_base 5: mod_base = OTHER; note = uridine-3'-phosphate
  modified_base 6: mod_base = OTHER; note = adenosine-3'-phosphate
  modified_base 7: mod_base = OTHER; note = cytidine-3'-phosphate
  modified_base 8: mod_base = OTHER; note = uridine-3'-phosphate
  modified_base 9: mod_base = OTHER; note = cytidine-3'-phosphate
  modified_base 10: mod_base = OTHER; note = uridine-3'-phosphate
  modified_base 11: mod_base = OTHER; note = guanosine-3'-phosphate
  modified_base 12: mod_base = OTHER; note = guanosine-3'-phosphate
  modified_base 13: mod_base = OTHER; note = uridine-3'-phosphate
  modified_base 14: mod_base = OTHER; note = adenosine-3'-phosphate
  modified_base 15: mod_base = OTHER; note = uridine-3'-phosphate
  modified_base 16: mod_base = OTHER; note = uridine-3'-phosphate
  modified_base 17: mod_base = OTHER; note = uridine-3'-phosphate
  modified_base 18: mod_base = OTHER; note = cytidine-3'-phosphate
  modified_base 19: mod_base = OTHER; note = cytidine-3'-phosphate
  misc_feature 1..19: note = RNA
  misc_feature 20..21: note = DNA
gtgctactctggtatttcctt

SEQ ID NO: 755 - DNA, 21 bp, synthetic construct
  source 1..21: mol_type = other DNA
  modified_base 1: mod_base = OTHER; note = guanosine-3'-phosphate
  modified_base 2: mod_base = OTHER; note = cytidine-3'-phosphate
  modified_base 3: mod_base = OTHER; note = uridine-3'-phosphate
  modified_base 4: mod_base = OTHER; note = adenosine-3'-phosphate
  modified_base 5: mod_base = OTHER; note = cytidine-3'-phosphate
  modified_base 6: mod_base = OTHER; note = uridine-3'-phosphate
  modified_base 7: mod_base = OTHER; note = cytidine-3'-phosphate
  modified_base 8: mod_base = OTHER; note = uridine-3'-phosphate
  modified_base 9: mod_base = OTHER; note = guanosine-3'-phosphate
  modified_base 10: mod_base = OTHER; note = guanosine-3'-phosphate
  modified_base 11: mod_base = OTHER; note = uridine-3'-phosphate
  modified_base 12: mod_base = OTHER; note = adenosine-3'-phosphate
  modified_base 13: mod_base = OTHER; note = uridine-3'-phosphate
  modified_base 14: mod_base = OTHER; note = uridine-3'-phosphate
  modified_base 15: mod_base = OTHER; note = uridine-3'-phosphate
  modified_base 16: mod_base = OTHER; note = cytidine-3'-phosphate
  modified_base 17: mod_base = OTHER; note = cytidine-3'-phosphate
  modified_base 18: mod_base = OTHER; note = uridine-3'-phosphate
  modified_base 19: mod_base = OTHER; note = adenosine-3'-phosphate
  misc_feature 1..19: note = RNA
  misc_feature 20..21: note = DNA
gctactctggtatttcctatt

SEQ ID NO: 756 - DNA, 21 bp, synthetic construct
  source 1..21: mol_type = other DNA
  modified_base 1: mod_base = OTHER; note = cytidine-3'-phosphate
  modified_base 2: mod_base = OTHER; note = uridine-3'-phosphate
  modified_base 3: mod_base = OTHER; note = adenosine-3'-phosphate
  modified_base 4: mod_base = OTHER; note = cytidine-3'-phosphate
  modified_base 5: mod_base = OTHER; note = uridine-3'-phosphate
  modified_base 6: mod_base = OTHER; note = cytidine-3'-phosphate
  modified_base 7: mod_base = OTHER; note = uridine-3'-phosphate
  modified_base 8: mod_base = OTHER; note = guanosine-3'-phosphate
  modified_base 9: mod_base = OTHER; note = guanosine-3'-phosphate
  modified_base 10: mod_base = OTHER; note = uridine-3'-phosphate
  modified_base 11: mod_base = OTHER; note = adenosine-3'-phosphate
  modified_base 12: mod_base = OTHER; note = uridine-3'-phosphate
  modified_base 13: mod_base = OTHER; note = uridine-3'-phosphate
  modified_base 14: mod_base = OTHER; note = uridine-3'-phosphate
  modified_base 15: mod_base = OTHER; note = cytidine-3'-phosphate
  modified_base 16: mod_base = OTHER; note = cytidine-3'-phosphate
  modified_base 17: mod_base = OTHER; note = uridine-3'-phosphate
  modified_base 18: mod_base = OTHER; note = adenosine-3'-phosphate
  modified_base 19: mod_base = OTHER; note = guanosine-3'-phosphate
  misc_feature 1..19: note = RNA
  misc_feature 20..21: note = DNA
ctactctggtatttcctagtt

SEQ ID NO: 757 - DNA, 21 bp, synthetic construct
  source 1..21: mol_type = other DNA
  modified_base 1: mod_base = OTHER; note = uridine-3'-phosphate
  modified_base 2: mod_base = OTHER; note = adenosine-3'-phosphate
  modified_base 3: mod_base = OTHER; note = cytidine-3'-phosphate
  modified_base 4: mod_base = OTHER; note = uridine-3'-phosphate
  modified_base 5: mod_base = OTHER; note = cytidine-3'-phosphate
  modified_base 6: mod_base = OTHER; note = uridine-3'-phosphate
  modified_base 7: mod_base = OTHER; note = guanosine-3'-phosphate
  modified_base 8: mod_base = OTHER; note = guanosine-3'-phosphate
  modified_base 9: mod_base = OTHER; note = uridine-3'-phosphate
  modified_base 10: mod_base = OTHER; note = adenosine-3'-phosphate
  modified_base 11: mod_base = OTHER; note = uridine-3'-phosphate
  modified_base 12: mod_base = OTHER; note = uridine-3'-phosphate
  modified_base 13: mod_base = OTHER; note = uridine-3'-phosphate
  modified_base 14: mod_base = OTHER; note = cytidine-3'-phosphate
  modified_base 15: mod_base = OTHER; note = cytidine-3'-phosphate
  modified_base 16: mod_base = OTHER; note = uridine-3'-phosphate
  modified_base 17: mod_base = OTHER; note = adenosine-3'-phosphate
  modified_base 18: mod_base = OTHER; note = guanosine-3'-phosphate
  modified_base 19: mod_base = OTHER; note = guanosine-3'-phosphate
  misc_feature 1..19: note = RNA
  misc_feature 20..21: note = DNA
tactctggtatttcctaggtt

SEQ ID NO: 758 - DNA, 21 bp, synthetic construct
  source 1..21: mol_type = other DNA
  modified_base 1: mod_base = OTHER; note = adenosine-3'-phosphate
  modified_base 2: mod_base = OTHER; note = cytidine-3'-phosphate
  modified_base 3: mod_base = OTHER; note = uridine-3'-phosphate
  modified_base 4: mod_base = OTHER; note = cytidine-3'-phosphate
  modified_base 5: mod_base = OTHER; note = uridine-3'-phosphate
  modified_base 6: mod_base = OTHER; note = guanosine-3'-phosphate
  modified_base 7: mod_base = OTHER; note = guanosine-3'-phosphate
  modified_base 8: mod_base = OTHER; note = uridine-3'-phosphate
  modified_base 9: mod_base = OTHER; note = adenosine-3'-phosphate
  modified_base 10: mod_base = OTHER; note = uridine-3'-phosphate
  modified_base 11: mod_base = OTHER; note = uridine-3'-phosphate
  modified_base 12: mod_base = OTHER; note = uridine-3'-phosphate
  modified_base 13: mod_base = OTHER; note = cytidine-3'-phosphate
  modified_base 14: mod_base = OTHER; note = cytidine-3'-phosphate
  modified_base 15: mod_base = OTHER; note = uridine-3'-phosphate
  modified_base 16: mod_base = OTHER; note = adenosine-3'-phosphate
  modified_base 17: mod_base = OTHER; note = guanosine-3'-phosphate
  modified_base 18: mod_base = OTHER; note = guanosine-3'-phosphate
  modified_base 19: mod_base = OTHER; note = guanosine-3'-phosphate
  misc_feature 1..19: note = RNA
  misc_feature 20..21: note = DNA
actctggtatttcctagggtt

SEQ ID NO: 759 - DNA, 21 bp, synthetic construct
  source 1..21: mol_type = other DNA
  modified_base 1: mod_base = OTHER; note = cytidine-3'-phosphate
  modified_base 2: mod_base = OTHER; note = uridine-3'-phosphate
  modified_base 3: mod_base = OTHER; note = cytidine-3'-phosphate
  modified_base 4: mod_base = OTHER; note = uridine-3'-phosphate
  modified_base 5: mod_base = OTHER; note = guanosine-3'-phosphate
  modified_base 6: mod_base = OTHER; note = guanosine-3'-phosphate
  modified_base 7: mod_base = OTHER; note = uridine-3'-phosphate
  modified_base 8: mod_base = OTHER; note = adenosine-3'-phosphate
  modified_base 9: mod_base = OTHER; note = uridine-3'-phosphate
  modified_base 10: mod_base = OTHER; note = uridine-3'-phosphate
  modified_base 11: mod_base = OTHER; note = uridine-3'-phosphate
  modified_base 12: mod_base = OTHER; note = cytidine-3'-phosphate
  modified_base 13: mod_base = OTHER; note = cytidine-3'-phosphate
  modified_base 14: mod_base = OTHER; note = uridine-3'-phosphate
  modified_base 15: mod_base = OTHER; note = adenosine-3'-phosphate
  modified_base 16: mod_base = OTHER; note = guanosine-3'-phosphate
  modified_base 17: mod_base = OTHER; note = guanosine-3'-phosphate
  modified_base 18: mod_base = OTHER; note = guanosine-3'-phosphate
  modified_base 19: mod_base = OTHER; note = uridine-3'-phosphate
  misc_feature 1..19: note = RNA
  misc_feature 20..21: note = DNA
ctctggtatttcctagggttt

SEQ ID NO: 760 - DNA, 21 bp, synthetic construct
  source 1..21: mol_type = other DNA
  modified_base 1: mod_base = OTHER; note = cytidine-3'-phosphate
  modified_base 2: mod_base = OTHER; note = uridine-3'-phosphate
  modified_base 3: mod_base = OTHER; note = guanosine-3'-phosphate
  modified_base 4: mod_base = OTHER; note = guanosine-3'-phosphate
  modified_base 5: mod_base = OTHER; note = uridine-3'-phosphate
  modified_base 6: mod_base = OTHER; note = adenosine-3'-phosphate
  modified_base 7: mod_base = OTHER; note = uridine-3'-phosphate
  modified_base 8: mod_base = OTHER; note = uridine-3'-phosphate
  modified_base 9: mod_base = OTHER; note = uridine-3'-phosphate
  modified_base 10: mod_base = OTHER; note = cytidine-3'-phosphate
  modified_base 11: mod_base = OTHER; note = cytidine-3'-phosphate
  modified_base 12: mod_base = OTHER; note = uridine-3'-phosphate
  modified_base 13: mod_base = OTHER; note = adenosine-3'-phosphate
  modified_base 14: mod_base = OTHER; note = guanosine-3'-phosphate
  modified_base 15: mod_base = OTHER; note = guanosine-3'-phosphate
  modified_base 16: mod_base = OTHER; note = guanosine-3'-phosphate
  modified_base 17: mod_base = OTHER; note = uridine-3'-phosphate
  modified_base 18: mod_base = OTHER; note = adenosine-3'-phosphate
  modified_base 19: mod_base = OTHER; note = cytidine-3'-phosphate
  misc_feature 1..19: note = RNA
  misc_feature 20..21: note = DNA
ctggtatttcctagggtactt

SEQ ID NO: 761 - DNA, 21 bp, synthetic construct
  source 1..21: mol_type = other DNA
  modified_base 1: mod_base = OTHER; note = guanosine-3'-phosphate
  modified_base 2: mod_base = OTHER; note = uridine-3'-phosphate
  modified_base 3: mod_base = OTHER; note = adenosine-3'-phosphate
  modified_base 4: mod_base = OTHER; note = uridine-3'-phosphate
  modified_base 5: mod_base = OTHER; note = uridine-3'-phosphate
  modified_base 6: mod_base = OTHER; note = uridine-3'-phosphate
  modified_base 7: mod_base = OTHER; note = cytidine-3'-phosphate
  modified_base 8: mod_base = OTHER; note = cytidine-3'-phosphate
  modified_base 9: mod_base = OTHER; note = uridine-3'-phosphate
  modified_base 10: mod_base = OTHER; note = adenosine-3'-phosphate
  modified_base 11: mod_base = OTHER; note = guanosine-3'-phosphate
  modified_base 12: mod_base = OTHER; note = guanosine-3'-phosphate
  modified_base 13: mod_base = OTHER; note = guanosine-3'-phosphate
  modified_base 14: mod_base = OTHER; note = uridine-3'-phosphate
  modified_base 15: mod_base = OTHER; note = adenosine-3'-phosphate
  modified_base 16: mod_base = OTHER; note = cytidine-3'-phosphate
  modified_base 17: mod_base = OTHER; note = adenosine-3'-phosphate
  modified_base 18: mod_base = OTHER; note = adenosine-3'-phosphate
  modified_base 19: mod_base = OTHER; note = guanosine-3'-phosphate
  misc_feature 1..19: note = RNA
  misc_feature 20..21: note = DNA
gtatttcctagggtacaagtt

SEQ ID NO: 762 - DNA, 21 bp, synthetic construct
  source 1..21: mol_type = other DNA
  modified_base 1: mod_base = OTHER; note = uridine-3'-phosphate
  modified_base 2: mod_base = OTHER; note = adenosine-3'-phosphate
  modified_base 3: mod_base = OTHER; note = uridine-3'-phosphate
  modified_base 4: mod_base = OTHER; note = uridine-3'-phosphate
  modified_base 5: mod_base = OTHER; note = uridine-3'-phosphate
  modified_base 6: mod_base = OTHER; note = cytidine-3'-phosphate
  modified_base 7: mod_base = OTHER; note = cytidine-3'-phosphate
  modified_base 8: mod_base = OTHER; note = uridine-3'-phosphate
  modified_base 9: mod_base = OTHER; note = adenosine-3'-phosphate
  modified_base 10: mod_base = OTHER; note = guanosine-3'-phosphate
  modified_base 11: mod_base = OTHER; note = guanosine-3'-phosphate
  modified_base 12: mod_base = OTHER; note = guanosine-3'-phosphate
  modified_base 13: mod_base = OTHER; note = uridine-3'-phosphate
  modified_base 14: mod_base = OTHER; note = adenosine-3'-phosphate
  modified_base 15: mod_base = OTHER; note = cytidine-3'-phosphate
  modified_base 16: mod_base = OTHER; note = adenosine-3'-phosphate
  modified_base 17: mod_base = OTHER; note = adenosine-3'-phosphate
  modified_base 18: mod_base = OTHER; note = guanosine-3'-phosphate
  modified_base 19: mod_base = OTHER; note = guanosine-3'-phosphate
  misc_feature 1..19: note = RNA
  misc_feature 20..21: note = DNA
tatttcctagggtacaaggtt

SEQ ID NO: 763 - DNA, 21 bp, synthetic construct
  source 1..21: mol_type = other DNA
  modified_base 1: mod_base = OTHER; note = adenosine-3'-phosphate
  modified_base 2: mod_base = OTHER; note = uridine-3'-phosphate
  modified_base 3: mod_base = OTHER; note = uridine-3'-phosphate
  modified_base 4: mod_base = OTHER; note = uridine-3'-phosphate
  modified_base 5: mod_base = OTHER; note = cytidine-3'-phosphate
  modified_base 6: mod_base = OTHER; note = cytidine-3'-phosphate
  modified_base 7: mod_base = OTHER; note = uridine-3'-phosphate
  modified_base 8: mod_base = OTHER; note = adenosine-3'-phosphate
  modified_base 9: mod_base = OTHER; note = guanosine-3'-phosphate
  modified_base 10: mod_base = OTHER; note = guanosine-3'-phosphate
  modified_base 11: mod_base = OTHER; note = guanosine-3'-phosphate
  modified_base 12: mod_base = OTHER; note = uridine-3'-phosphate
  modified_base 13: mod_base = OTHER; note = adenosine-3'-phosphate
  modified_base 14: mod_base = OTHER; note = cytidine-3'-phosphate
  modified_base 15: mod_base = OTHER; note = adenosine-3'-phosphate
  modified_base 16: mod_base = OTHER; note = adenosine-3'-phosphate
  modified_base 17: mod_base = OTHER; note = guanosine-3'-phosphate
  modified_base 18: mod_base = OTHER; note = guanosine-3'-phosphate
  modified_base 19: mod_base = OTHER; note = cytidine-3'-phosphate
  misc_feature 1..19: note = RNA
  misc_feature 20..21: note = DNA
atttcctagggtacaaggctt

SEQ ID NO: 764 - DNA, 21 bp, synthetic construct
  source 1..21: mol_type = other DNA
  modified_base 1: mod_base = OTHER; note = uridine-3'-phosphate
  modified_base 2: mod_base = OTHER; note = uridine-3'-phosphate
  modified_base 3: mod_base = OTHER; note = uridine-3'-phosphate
  modified_base 4: mod_base = OTHER; note = cytidine-3'-phosphate
  modified_base 5: mod_base = OTHER; note = cytidine-3'-phosphate
  modified_base 6: mod_base = OTHER; note = uridine-3'-phosphate
  modified_base 7: mod_base = OTHER; note = adenosine-3'-phosphate
  modified_base 8: mod_base = OTHER; note = guanosine-3'-phosphate
  modified_base 9: mod_base = OTHER; note = guanosine-3'-phosphate
  modified_base 10: mod_base = OTHER; note = guanosine-3'-phosphate
  modified_base 11: mod_base = OTHER; note = uridine-3'-phosphate
  modified_base 12: mod_base = OTHER; note = adenosine-3'-phosphate
  modified_base 13: mod_base = OTHER; note = cytidine-3'-phosphate
  modified_base 14: mod_base = OTHER; note = adenosine-3'-phosphate
  modified_base 15: mod_base = OTHER; note = adenosine-3'-phosphate
  modified_base 16: mod_base = OTHER; note = guanosine-3'-phosphate
  modified_base 17: mod_base = OTHER; note = guanosine-3'-phosphate
  modified_base 18: mod_base = OTHER; note = cytidine-3'-phosphate
  modified_base 19: mod_base = OTHER; note = guanosine-3'-phosphate
  misc_feature 1..19: note = RNA
  misc_feature 20..21: note = DNA
tttcctagggtacaaggcgtt

SEQ ID NO: 765 - DNA, 21 bp, synthetic construct
  source 1..21: mol_type = other DNA
  modified_base 1: mod_base = OTHER; note = uridine-3'-phosphate
  modified_base 2: mod_base = OTHER; note = uridine-3'-phosphate
  modified_base 3: mod_base = OTHER; note = cytidine-3'-phosphate
  modified_base 4: mod_base = OTHER; note = cytidine-3'-phosphate
  modified_base 5: mod_base = OTHER; note = uridine-3'-phosphate
  modified_base 6: mod_base = OTHER; note = adenosine-3'-phosphate
  modified_base 7: mod_base = OTHER; note = guanosine-3'-phosphate
  modified_base 8: mod_base = OTHER; note = guanosine-3'-phosphate
  modified_base 9: mod_base = OTHER; note = guanosine-3'-phosphate
  modified_base 10: mod_base = OTHER; note = uridine-3'-phosphate
  modified_base 11: mod_base = OTHER; note = adenosine-3'-phosphate
  modified_base 12: mod_base = OTHER; note = cytidine-3'-phosphate
  modified_base 13: mod_base = OTHER; note = adenosine-3'-phosphate
  modified_base 14: mod_base = OTHER; note = adenosine-3'-phosphate
  modified_base 15: mod_base = OTHER; note = guanosine-3'-phosphate
  modified_base 16: mod_base = OTHER; note = guanosine-3'-phosphate
  modified_base 17: mod_base = OTHER; note = cytidine-3'-phosphate
  modified_base 18: mod_base = OTHER; note = guanosine-3'-phosphate
  modified_base 19: mod_base = OTHER; note = guanosine-3'-phosphate
  misc_feature 1..19: note = RNA
  misc_feature 20..21: note = DNA
ttcctagggtacaaggcggtt

SEQ ID NO: 766 - DNA, 21 bp, synthetic construct
  source 1..21: mol_type = other DNA
  modified_base 1: mod_base = OTHER; note = cytidine-3'-phosphate
  modified_base 2: mod_base = OTHER; note = cytidine-3'-phosphate
  modified_base 3: mod_base = OTHER; note = uridine-3'-phosphate
  modified_base 4: mod_base = OTHER; note = adenosine-3'-phosphate
  modified_base 5: mod_base = OTHER; note = guanosine-3'-phosphate
  modified_base 6: mod_base = OTHER; note = guanosine-3'-phosphate
  modified_base 7: mod_base = OTHER; note = guanosine-3'-phosphate
  modified_base 8: mod_base = OTHER; note = uridine-3'-phosphate
  modified_base 9: mod_base = OTHER; note = adenosine-3'-phosphate
  modified_base 10: mod_base = OTHER; note = cytidine-3'-phosphate
  modified_base 11: mod_base = OTHER; note = adenosine-3'-phosphate
  modified_base 12: mod_base = OTHER; note = adenosine-3'-phosphate
  modified_base 13: mod_base = OTHER; note = guanosine-3'-phosphate
  modified_base 14: mod_base = OTHER; note = guanosine-3'-phosphate
  modified_base 15: mod_base = OTHER; note = cytidine-3'-phosphate
  modified_base 16: mod_base = OTHER; note = guanosine-3'-phosphate
  modified_base 17: mod_base = OTHER; note = guanosine-3'-phosphate
  modified_base 18: mod_base = OTHER; note = adenosine-3'-phosphate
  modified_base 19: mod_base = OTHER; note = guanosine-3'-phosphate
  misc_feature 1..19: note = RNA
  misc_feature 20..21: note = DNA
cctagggtacaaggcggagtt

SEQ ID NO: 767 - DNA, 21 bp, synthetic construct
  source 1..21: mol_type = other DNA
  modified_base 1: mod_base = OTHER; note = cytidine-3'-phosphate
  modified_base 2: mod_base = OTHER; note = uridine-3'-phosphate
  modified_base 3: mod_base = OTHER; note = adenosine-3'-phosphate
  modified_base 4: mod_base = OTHER; note = guanosine-3'-phosphate
  modified_base 5: mod_base = OTHER; note = guanosine-3'-phosphate
  modified_base 6: mod_base = OTHER; note = guanosine-3'-phosphate
  modified_base 7: mod_base = OTHER; note = uridine-3'-phosphate
  modified_base 8: mod_base = OTHER; note = adenosine-3'-phosphate
  modified_base 9: mod_base = OTHER; note = cytidine-3'-phosphate
  modified_base 10: mod_base = OTHER; note = adenosine-3'-phosphate
  modified_base 11: mod_base = OTHER; note = adenosine-3'-phosphate
  modified_base 12: mod_base = OTHER; note = guanosine-3'-phosphate
  modified_base 13: mod_base = OTHER; note = guanosine-3'-phosphate
  modified_base 14: mod_base = OTHER; note = cytidine-3'-phosphate
  modified_base 15: mod_base = OTHER; note = guanosine-3'-phosphate
  modified_base 16: mod_base = OTHER; note = guanosine-3'-phosphate
  modified_base 17: mod_base = OTHER; note = adenosine-3'-phosphate
  modified_base 18: mod_base = OTHER; note = guanosine-3'-phosphate
  modified_base 19: mod_base = OTHER; note = guanosine-3'-phosphate
  misc_feature 1..19: note = RNA
  misc_feature 20..21: note = DNA
ctagggtacaaggcggaggtt

SEQ ID NO: 768 - DNA, 21 bp, synthetic construct
  source 1..21: mol_type = other DNA
  modified_base 1: mod_base = OTHER; note = uridine-3'-phosphate
  modified_base 2: mod_base = OTHER; note = adenosine-3'-phosphate
  modified_base 3: mod_base = OTHER; note = guanosine-3'-phosphate
  modified_base 4: mod_base = OTHER; note = guanosine-3'-phosphate
  modified_base 5: mod_base = OTHER; note = guanosine-3'-phosphate
  modified_base 6: mod_base = OTHER; note = uridine-3'-phosphate
  modified_base 7: mod_base = OTHER; note = adenosine-3'-phosphate
  modified_base 8: mod_base = OTHER; note = cytidine-3'-phosphate
  modified_base 9: mod_base = OTHER; note = adenosine-3'-phosphate
  modified_base 10: mod_base = OTHER; note = adenosine-3'-phosphate
  modified_base 11: mod_base = OTHER; note = guanosine-3'-phosphate
  modified_base 12: mod_base = OTHER; note = guanosine-3'-phosphate
  modified_base 13: mod_base = OTHER; note = cytidine-3'-phosphate
  modified_base 14: mod_base = OTHER; note = guanosine-3'-phosphate
  modified_base 15: mod_base = OTHER; note = guanosine-3'-phosphate
  modified_base 16: mod_base = OTHER; note = adenosine-3'-phosphate
  modified_base 17: mod_base = OTHER; note = guanosine-3'-phosphate
  modified_base 18: mod_base = OTHER; note = guanosine-3'-phosphate
  modified_base 19: mod_base = OTHER; note = uridine-3'-phosphate
  misc_feature 1..19: note = RNA
  misc_feature 20..21: note = DNA
tagggtacaaggcggaggttt

SEQ ID NO: 769 - DNA, 21 bp, synthetic construct
  source 1..21: mol_type = other DNA
  modified_base 1: mod_base = OTHER; note = adenosine-3'-phosphate
  modified_base 2: mod_base = OTHER; note = guanosine-3'-phosphate
  modified_base 3: mod_base = OTHER; note = guanosine-3'-phosphate
  modified_base 4: mod_base = OTHER; note = guanosine-3'-phosphate
  modified_base 5: mod_base = OTHER; note = uridine-3'-phosphate
  modified_base 6: mod_base = OTHER; note = adenosine-3'-phosphate
  modified_base 7: mod_base = OTHER; note = cytidine-3'-phosphate
  modified_base 8: mod_base = OTHER; note = adenosine-3'-phosphate
  modified_base 9: mod_base = OTHER; note = adenosine-3'-phosphate
  modified_base 10: mod_base = OTHER; note = guanosine-3'-phosphate
  modified_base 11: mod_base = OTHER; note = guanosine-3'-phosphate
  modified_base 12: mod_base = OTHER; note = cytidine-3'-phosphate
  modified_base 13: mod_base = OTHER; note = guanosine-3'-phosphate
  modified_base 14: mod_base = OTHER; note = guanosine-3'-phosphate
  modified_base 15: mod_base = OTHER; note = adenosine-3'-phosphate
  modified_base 16: mod_base = OTHER; note = guanosine-3'-phosphate
  modified_base 17: mod_base = OTHER; note = guanosine-3'-phosphate
  modified_base 18: mod_base = OTHER; note = uridine-3'-phosphate
  modified_base 19: mod_base = OTHER; note = guanosine-3'-phosphate
  misc_feature 1..19: note = RNA
  misc_feature 20..21: note = DNA
agggtacaaggcggaggtgtt

SEQ ID NO: 770 - DNA, 21 bp, synthetic construct
  source 1..21: mol_type = other DNA
  modified_base 1: mod_base = OTHER; note = guanosine-3'-phosphate
  modified_base 2: mod_base = OTHER; note = guanosine-3'-phosphate
  modified_base 3: mod_base = OTHER; note = guanosine-3'-phosphate
  modified_base 4: mod_base = OTHER; note = uridine-3'-phosphate
  modified_base 5: mod_base = OTHER; note = adenosine-3'-phosphate
  modified_base 6: mod_base = OTHER; note = cytidine-3'-phosphate
  modified_base 7: mod_base = OTHER; note = adenosine-3'-phosphate
  modified_base 8: mod_base = OTHER; note = adenosine-3'-phosphate
  modified_base 9: mod_base = OTHER; note = guanosine-3'-phosphate
  modified_base 10: mod_base = OTHER; note = guanosine-3'-phosphate
  modified_base 11: mod_base = OTHER; note = cytidine-3'-phosphate
  modified_base 12: mod_base = OTHER; note = guanosine-3'-phosphate
  modified_base 13: mod_base = OTHER; note = guanosine-3'-phosphate
  modified_base 14: mod_base = OTHER; note = adenosine-3'-phosphate
  modified_base 15: mod_base = OTHER; note = guanosine-3'-phosphate
  modified_base 16: mod_base = OTHER; note = guanosine-3'-phosphate
  modified_base 17: mod_base = OTHER; note = uridine-3'-phosphate
  modified_base 18: mod_base = OTHER; note = guanosine-3'-phosphate
  modified_base 19: mod_base = OTHER; note = adenosine-3'-phosphate
  misc_feature 1..19: note = RNA
  misc_feature 20..21: note = DNA
gggtacaaggcggaggtgatt

SEQ ID NO: 771 - DNA, 21 bp, synthetic construct
  source 1..21: mol_type = other DNA
  modified_base 1: mod_base = OTHER; note = guanosine-3'-phosphate
  modified_base 2: mod_base = OTHER; note = guanosine-3'-phosphate
  modified_base 3: mod_base = OTHER; note = uridine-3'-phosphate
  modified_base 4: mod_base = OTHER; note = adenosine-3'-phosphate
  modified_base 5: mod_base = OTHER; note = cytidine-3'-phosphate
  modified_base 6: mod_base = OTHER; note = adenosine-3'-phosphate
  modified_base 7: mod_base = OTHER; note = adenosine-3'-phosphate
  modified_base 8: mod_base = OTHER; note = guanosine-3'-phosphate
  modified_base 9: mod_base = OTHER; note = guanosine-3'-phosphate
  modified_base 10: mod_base = OTHER; note = cytidine-3'-phosphate
  modified_base 11: mod_base = OTHER; note = guanosine-3'-phosphate
  modified_base 12: mod_base = OTHER; note = guanosine-3'-phosphate
  modified_base 13: mod_base = OTHER; note = adenosine-3'-phosphate
  modified_base 14: mod_base = OTHER; note = guanosine-3'-phosphate
  modified_base 15: mod_base = OTHER; note = guanosine-3'-phosphate
  modified_base 16: mod_base = OTHER; note = uridine-3'-phosphate
  modified_base 17: mod_base = OTHER; note = guanosine-3'-phosphate
  modified_base 18: mod_base = OTHER; note = adenosine-3'-phosphate
  modified_base 19: mod_base = OTHER; note = uridine-3'-phosphate
  misc_feature 1..19: note = RNA
  misc_feature 20..21: note = DNA
ggtacaaggcggaggtgattt

SEQ ID NO: 772 - DNA, 21 bp, synthetic construct
  source 1..21: mol_type = other DNA
  modified_base 1: mod_base = OTHER; note = guanosine-3'-phosphate
  modified_base 2: mod_base = OTHER; note = uridine-3'-phosphate
  modified_base 3: mod_base = OTHER; note = adenosine-3'-phosphate
  modified_base 4: mod_base = OTHER; note = cytidine-3'-phosphate
  modified_base 5: mod_base = OTHER; note = adenosine-3'-phosphate
  modified_base 6: mod_base = OTHER; note = adenosine-3'-phosphate
  modified_base 7: mod_base = OTHER; note = guanosine-3'-phosphate
  modified_base 8: mod_base = OTHER; note = guanosine-3'-phosphate
  modified_base 9: mod_base = OTHER; note = cytidine-3'-phosphate
  modified_base 10: mod_base = OTHER; note = guanosine-3'-phosphate
  modified_base 11: mod_base = OTHER; note = guanosine-3'-phosphate
  modified_base 12: mod_base = OTHER; note = adenosine-3'-phosphate
  modified_base 13: mod_base = OTHER; note = guanosine-3'-phosphate
  modified_base 14: mod_base = OTHER; note = guanosine-3'-phosphate
  modified_base 15: mod_base = OTHER; note = uridine-3'-phosphate
  modified_base 16: mod_base = OTHER; note = guanosine-3'-phosphate
  modified_base 17: mod_base = OTHER; note = adenosine-3'-phosphate
  modified_base 18: mod_base = OTHER; note = uridine-3'-phosphate
  modified_base 19: mod_base = OTHER; note = guanosine-3'-phosphate
  misc_feature 1..19: note = RNA
  misc_feature 20..21: note = DNA
gtacaaggcggaggtgatgtt

SEQ ID NO: 773 - DNA, 21 bp, synthetic construct
  source 1..21: mol_type = other DNA
  modified_base 1: mod_base = OTHER; note = uridine-3'-phosphate
  modified_base 2: mod_base = OTHER; note = adenosine-3'-phosphate
  modified_base 3: mod_base = OTHER; note = cytidine-3'-phosphate
  modified_base 4: mod_base = OTHER; note = adenosine-3'-phosphate
  modified_base 5: mod_base = OTHER; note = adenosine-3'-phosphate
  modified_base 6: mod_base = OTHER; note = guanosine-3'-phosphate
  modified_base 7: mod_base = OTHER; note = guanosine-3'-phosphate
  modified_base 8: mod_base = OTHER; note = cytidine-3'-phosphate
  modified_base 9: mod_base = OTHER; note = guanosine-3'-phosphate
  modified_base 10: mod_base = OTHER; note = guanosine-3'-phosphate
  modified_base 11: mod_base = OTHER; note = adenosine-3'-phosphate
  modified_base 12: mod_base = OTHER; note = guanosine-3'-phosphate
  modified_base 13: mod_base = OTHER; note = guanosine-3'-phosphate
  modified_base 14: mod_base = OTHER; note = uridine-3'-phosphate
  modified_base 15: mod_base = OTHER; note = guanosine-3'-phosphate
  modified_base 16: mod_base = OTHER; note = adenosine-3'-phosphate
  modified_base 17: mod_base = OTHER; note = uridine-3'-phosphate
  modified_base 18: mod_base = OTHER; note = guanosine-3'-phosphate
  modified_base 19: mod_base = OTHER; note = guanosine-3'-phosphate
  misc_feature 1..19: note = RNA
  misc_feature 20..21: note = DNA
tacaaggcggaggtgatggtt

SEQ ID NO: 774 - DNA, 21 bp, synthetic construct
  source 1..21: mol_type = other DNA
  modified_base 1: mod_base = OTHER; note = adenosine-3'-phosphate
  modified_base 2: mod_base = OTHER; note = cytidine-3'-phosphate
  modified_base 3: mod_base = OTHER; note = adenosine-3'-phosphate
  modified_base 4: mod_base = OTHER; note = adenosine-3'-phosphate
  modified_base 5: mod_base = OTHER; note = guanosine-3'-phosphate
  modified_base 6: mod_base = OTHER; note = guanosine-3'-phosphate
  modified_base 7: mod_base = OTHER; note = cytidine-3'-phosphate
  modified_base 8: mod_base = OTHER; note = guanosine-3'-phosphate
  modified_base 9: mod_base = OTHER; note = guanosine-3'-phosphate
  modified_base 10: mod_base = OTHER; note = adenosine-3'-phosphate
  modified_base 11: mod_base = OTHER; note = guanosine-3'-phosphate
  modified_base 12: mod_base = OTHER; note = guanosine-3'-phosphate
  modified_base 13: mod_base = OTHER; note = uridine-3'-phosphate
  modified_base 14: mod_base = OTHER; note = guanosine-3'-phosphate
  modified_base 15: mod_base = OTHER; note = adenosine-3'-phosphate
  modified_base 16: mod_base = OTHER; note = uridine-3'-phosphate
  modified_base 17: mod_base = OTHER; note = guanosine-3'-phosphate
  modified_base 18: mod_base = OTHER; note = guanosine-3'-phosphate
  modified_base 19: mod_base = OTHER; note = uridine-3'-phosphate
  misc_feature 1..19: note = RNA
  misc_feature 20..21: note = DNA
acaaggcggaggtgatggttt

SEQ ID NO: 775 - DNA, 21 bp, synthetic construct
  source 1..21: mol_type = other DNA
  modified_base 1: mod_base = OTHER; note = cytidine-3'-phosphate
  modified_base 2: mod_base = OTHER; note = adenosine-3'-phosphate
  modified_base 3: mod_base = OTHER; note = adenosine-3'-phosphate
  modified_base 4: mod_base = OTHER; note = guanosine-3'-phosphate
  modified_base 5: mod_base = OTHER; note = guanosine-3'-phosphate
  modified_base 6: mod_base = OTHER; note = cytidine-3'-phosphate
  modified_base 7: mod_base = OTHER; note = guanosine-3'-phosphate
  modified_base 8: mod_base = OTHER; note = guanosine-3'-phosphate
  modified_base 9: mod_base = OTHER; note = adenosine-3'-phosphate
  modified_base 10: mod_base = OTHER; note = guanosine-3'-phosphate
  modified_base 11: mod_base = OTHER; note = guanosine-3'-phosphate
  modified_base 12: mod_base = OTHER; note = uridine-3'-phosphate
  modified_base 13: mod_base = OTHER; note = guanosine-3'-phosphate
  modified_base 14: mod_base = OTHER; note = adenosine-3'-phosphate
  modified_base 15: mod_base = OTHER; note = uridine-3'-phosphate
  modified_base 16: mod_base = OTHER; note = guanosine-3'-phosphate
  modified_base 17: mod_base = OTHER; note = guanosine-3'-phosphate
  modified_base 18: mod_base = OTHER; note = uridine-3'-phosphate
  modified_base 19: mod_base = OTHER; note = cytidine-3'-phosphate
  misc_feature 1..19: note = RNA
  misc_feature 20..21: note = DNA
caaggcggaggtgatggtctt

SEQ ID NO: 776 - DNA, 21 bp, synthetic construct
  source 1..21: mol_type = other DNA
  modified_base 1: mod_base = OTHER; note = adenosine-3'-phosphate
  modified_base 2: mod_base = OTHER; note = adenosine-3'-phosphate
  modified_base 3: mod_base = OTHER; note = guanosine-3'-phosphate
  modified_base 4: mod_base = OTHER; note = guanosine-3'-phosphate
  modified_base 5: mod_base = OTHER; note = cytidine-3'-phosphate
  modified_base 6: mod_base = OTHER; note = guanosine-3'-phosphate
  modified_base 7: mod_base = OTHER; note = guanosine-3'-phosphate
  modified_base 8: mod_base = OTHER; note = adenosine-3'-phosphate
  modified_base 9: mod_base = OTHER; note = guanosine-3'-phosphate
  modified_base 10: mod_base = OTHER; note = guanosine-3'-phosphate
  modified_base 11: mod_base = OTHER; note = uridine-3'-phosphate
  modified_base 12: mod_base = OTHER; note = guanosine-3'-phosphate
  modified_base 13: mod_base = OTHER; note = adenosine-3'-phosphate
  modified_base 14: mod_base = OTHER; note = uridine-3'-phosphate
  modified_base 15: mod_base = OTHER; note = guanosine-3'-phosphate
  modified_base 16: mod_base = OTHER; note = guanosine-3'-phosphate
  modified_base 17: mod_base = OTHER; note = uridine-3'-phosphate
  modified_base 18: mod_base = OTHER; note = cytidine-3'-phosphate
  modified_base 19: mod_base = OTHER; note = adenosine-3'-phosphate
  misc_feature 1..19: note = RNA
  misc_feature 20..21: note = DNA
aaggcggaggtgatggtcatt

SEQ ID NO: 777 - DNA, 21 bp, synthetic construct
  source 1..21: mol_type = other DNA
  modified_base 1: mod_base = OTHER; note = adenosine-3'-phosphate
  modified_base 2: mod_base = OTHER; note = guanosine-3'-phosphate
  modified_base 3: mod_base = OTHER; note = guanosine-3'-phosphate
  modified_base 4: mod_base = OTHER; note = cytidine-3'-phosphate
  modified_base 5: mod_base = OTHER; note = guanosine-3'-phosphate
  modified_base 6: mod_base = OTHER; note = guanosine-3'-phosphate
  modified_base 7: mod_base = OTHER; note = adenosine-3'-phosphate
  modified_base 8: mod_base = OTHER; note = guanosine-3'-phosphate
  modified_base 9: mod_base = OTHER; note = guanosine-3'-phosphate
  modified_base 10: mod_base = OTHER; note = uridine-3'-phosphate
  modified_base 11: mod_base = OTHER; note = guanosine-3'-phosphate
  modified_base 12: mod_base = OTHER; note = adenosine-3'-phosphate
  modified_base 13: mod_base = OTHER; note = uridine-3'-phosphate
  modified_base 14: mod_base = OTHER; note = guanosine-3'-phosphate
  modified_base 15: mod_base = OTHER; note = guanosine-3'-phosphate
  modified_base 16: mod_base = OTHER; note = uridine-3'-phosphate
  modified_base 17: mod_base = OTHER; note = cytidine-3'-phosphate
  modified_base 18: mod_base = OTHER; note = adenosine-3'-phosphate
  modified_base 19: mod_base = OTHER; note = guanosine-3'-phosphate
  misc_feature 1..19: note = RNA
  misc_feature 20..21: note = DNA
aggcggaggtgatggtcagtt

SEQ ID NO: 778 - DNA, 21 bp, synthetic construct
  source 1..21: mol_type = other DNA
  modified_base 1: mod_base = OTHER; note = uridine-3'-phosphate
  modified_base 2: mod_base = OTHER; note = guanosine-3'-phosphate
  modified_base 3: mod_base = OTHER; note = adenosine-3'-phosphate
  modified_base 4: mod_base = OTHER; note = uridine-3'-phosphate
  modified_base 5: mod_base = OTHER; note = guanosine-3'-phosphate
  modified_base 6: mod_base = OTHER; note = guanosine-3'-phosphate
  modified_base 7: mod_base = OTHER; note = uridine-3'-phosphate
  modified_base 8: mod_base = OTHER; note = cytidine-3'-phosphate
  modified_base 9: mod_base = OTHER; note = adenosine-3'-phosphate
  modified_base 10: mod_base = OTHER; note = guanosine-3'-phosphate
  modified_base 11: mod_base = OTHER; note = cytidine-3'-phosphate
  modified_base 12: mod_base = OTHER; note = cytidine-3'-phosphate
  modified_base 13: mod_base = OTHER; note = adenosine-3'-phosphate
  modified_base 14: mod_base = OTHER; note = guanosine-3'-phosphate
  modified_base 15: mod_base = OTHER; note = guanosine-3'-phosphate
  modified_base 16: mod_base = OTHER; note = uridine-3'-phosphate
  modified_base 17: mod_base = OTHER; note = guanosine-3'-phosphate
  modified_base 18: mod_base = OTHER; note = uridine-3'-phosphate
  modified_base 19: mod_base = OTHER; note = adenosine-3'-phosphate
  misc_feature 1..19: note = RNA
  misc_feature 20..21: note = DNA
tgatggtcagccaggtgtatt

SEQ ID NO: 779 - DNA, 21 bp, synthetic construct
  source 1..21: mol_type = other DNA
  modified_base 1: mod_base = OTHER; note = cytidine-3'-phosphate
  modified_base 2: mod_base = OTHER; note = cytidine-3'-phosphate
  modified_base 3: mod_base = OTHER; note = adenosine-3'-phosphate
  modified_base 4: mod_base = OTHER; note = guanosine-3'-phosphate
  modified_base 5: mod_base = OTHER; note = guanosine-3'-phosphate
  modified_base 6: mod_base = OTHER; note = uridine-3'-phosphate
  modified_base 7: mod_base = OTHER; note = guanosine-3'-phosphate
  modified_base 8: mod_base = OTHER; note = uridine-3'-phosphate
  modified_base 9: mod_base = OTHER; note = adenosine-3'-phosphate
  modified_base 10: mod_base = OTHER; note = cytidine-3'-phosphate
  modified_base 11: mod_base = OTHER; note = uridine-3'-phosphate
  modified_base 12: mod_base = OTHER; note = cytidine-3'-phosphate
  modified_base 13: mod_base = OTHER; note = adenosine-3'-phosphate
  modified_base 14: mod_base = OTHER; note = guanosine-3'-phosphate
  modified_base 15: mod_base = OTHER; note = guanosine-3'-phosphate
  modified_base 16: mod_base = OTHER; note = cytidine-3'-phosphate
  modified_base 17: mod_base = OTHER; note = adenosine-3'-phosphate
  modified_base 18: mod_base = OTHER; note = guanosine-3'-phosphate
  modified_base 19: mod_base = OTHER; note = uridine-3'-phosphate
  misc_feature 1..19: note = RNA
  misc_feature 20..21: note = DNA
ccaggtgtactcaggcagttt

SEQ ID NO: 780 - DNA, 21 bp, synthetic construct
  source 1..21: mol_type = other DNA
  modified_base 1: mod_base = OTHER; note = guanosine-3'-phosphate
  modified_base 2: mod_base = OTHER; note = cytidine-3'-phosphate
  modified_base 3: mod_base = OTHER; note = adenosine-3'-phosphate
  modified_base 4: mod_base = OTHER; note = guanosine-3'-phosphate
  modified_base 5: mod_base = OTHER; note = uridine-3'-phosphate
  modified_base 6: mod_base = OTHER; note = cytidine-3'-phosphate
  modified_base 7: mod_base = OTHER; note = uridine-3'-phosphate
  modified_base 8: mod_base = OTHER; note = guanosine-3'-phosphate
  modified_base 9: mod_base = OTHER; note = cytidine-3'-phosphate
  modified_base 10: mod_base = OTHER; note = guanosine-3'-phosphate
  modified_base 11: mod_base = OTHER; note = uridine-3'-phosphate
  modified_base 12: mod_base = OTHER; note = guanosine-3'-phosphate
  modified_base 13: mod_base = OTHER; note = uridine-3'-phosphate
  modified_base 14: mod_base = OTHER; note = adenosine-3'-phosphate
  modified_base 15: mod_base = OTHER; note = cytidine-3'-phosphate
  modified_base 16: mod_base = OTHER; note = uridine-3'-phosphate
  modified_base 17: mod_base = OTHER; note = cytidine-3'-phosphate
  modified_base 18: mod_base = OTHER; note = adenosine-3'-phosphate
  modified_base 19: mod_base = OTHER; note = adenosine-3'-phosphate
  misc_feature 1..19: note = RNA
  misc_feature 20..21: note = DNA
gcagtctgcgtgtactcaatt

SEQ ID NO: 781 - DNA, 21 bp, synthetic construct
  source 1..21: mol_type = other DNA
  modified_base 1: mod_base = OTHER; note = guanosine-3'-phosphate
  modified_base 2: mod_base = OTHER; note = cytidine-3'-phosphate
  modified_base 3: mod_base = OTHER; note = guanosine-3'-phosphate
  modified_base 4: mod_base = OTHER; note = uridine-3'-phosphate
  modified_base 5: mod_base = OTHER; note = guanosine-3'-phosphate
  modified_base 6: mod_base = OTHER; note = uridine-3'-phosphate
  modified_base 7: mod_base = OTHER; note = adenosine-3'-phosphate
  modified_base 8: mod_base = OTHER; note = cytidine-3'-phosphate
  modified_base 9: mod_base = OTHER; note = uridine-3'-phosphate
  modified_base 10: mod_base = OTHER; note = cytidine-3'-phosphate
  modified_base 11: mod_base = OTHER; note = adenosine-3'-phosphate
  modified_base 12: mod_base = OTHER; note = adenosine-3'-phosphate
  modified_base 13: mod_base = OTHER; note = uridine-3'-phosphate
  modified_base 14: mod_base = OTHER; note = cytidine-3'-phosphate
  modified_base 15: mod_base = OTHER; note = guanosine-3'-phosphate
  modified_base 16: mod_base = OTHER; note = cytidine-3'-phosphate
  modified_base 17: mod_base = OTHER; note = cytidine-3'-phosphate
  modified_base 18: mod_base = OTHER; note = adenosine-3'-phosphate
  modified_base 19: mod_base = OTHER; note = cytidine-3'-phosphate
  misc_feature 1..19: note = RNA
  misc_feature 20..21: note = DNA
gcgtgtactcaatcgccactt

SEQ ID NO: 782 - DNA, 21 bp, synthetic construct
  source 1..21: mol_type = other DNA
  modified_base 1: mod_base = OTHER; note = uridine-3'-phosphate
  modified_base 2: mod_base = OTHER; note = cytidine-3'-phosphate
  modified_base 3: mod_base = OTHER; note = guanosine-3'-phosphate
  modified_base 4: mod_base = OTHER; note = cytidine-3'-phosphate
  modified_base 5: mod_base = OTHER; note = cytidine-3'-phosphate
  modified_base 6: mod_base = OTHER; note = adenosine-3'-phosphate
  modified_base 7: mod_base = OTHER; note = cytidine-3'-phosphate
  modified_base 8: mod_base = OTHER; note = uridine-3'-phosphate
  modified_base 9: mod_base = OTHER; note = uridine-3'-phosphate
  modified_base 10: mod_base = OTHER; note = cytidine-3'-phosphate
  modified_base 11: mod_base = OTHER; note = uridine-3'-phosphate
  modified_base 12: mod_base = OTHER; note = cytidine-3'-phosphate
  modified_base 13: mod_base = OTHER; note = cytidine-3'-phosphate
  modified_base 14: mod_base = OTHER; note = cytidine-3'-phosphate
  modified_base 15: mod_base = OTHER; note = adenosine-3'-phosphate
  modified_base 16: mod_base = OTHER; note = guanosine-3'-phosphate
  modified_base 17: mod_base = OTHER; note = guanosine-3'-phosphate
  modified_base 18: mod_base = OTHER; note = adenosine-3'-phosphate
  modified_base 19: mod_base = OTHER; note = uridine-3'-phosphate
  misc_feature 1..19: note = RNA
  misc_feature 20..21: note = DNA
tcgccacttctcccaggattt

SEQ ID NO: 783 - DNA, 21 bp, synthetic construct
  source 1..21: mol_type = other DNA
  modified_base 1: mod_base = OTHER; note = cytidine-3'-phosphate
  modified_base 2: mod_base = OTHER; note = uridine-3'-phosphate
  modified_base 3: mod_base = OTHER; note = cytidine-3'-phosphate
  modified_base 4: mod_base = OTHER; note = cytidine-3'-phosphate
  modified_base 5: mod_base = OTHER; note = cytidine-3'-phosphate
  modified_base 6: mod_base = OTHER; note = adenosine-3'-phosphate
  modified_base 7: mod_base = OTHER; note = guanosine-3'-phosphate
  modified_base 8: mod_base = OTHER; note = guanosine-3'-phosphate
  modified_base 9: mod_base = OTHER; note = adenosine-3'-phosphate
  modified_base 10: mod_base = OTHER; note = uridine-3'-phosphate
  modified_base 11: mod_base = OTHER; note = cytidine-3'-phosphate
  modified_base 12: mod_base = OTHER; note = uridine-3'-phosphate
  modified_base 13: mod_base = OTHER; note = uridine-3'-phosphate
  modified_base 14: mod_base = OTHER; note = adenosine-3'-phosphate
  modified_base 15: mod_base = OTHER; note = cytidine-3'-phosphate
  modified_base 16: mod_base = OTHER; note = cytidine-3'-phosphate
  modified_base 17: mod_base = OTHER; note = cytidine-3'-phosphate
  modified_base 18: mod_base = OTHER; note = guanosine-3'-phosphate
  modified_base 19: mod_base = OTHER; note = cytidine-3'-phosphate
  misc_feature 1..19: note = RNA
  misc_feature 20..21: note = DNA
ctcccaggatcttacccgctt

SEQ ID NO: 784 - DNA, 21 bp, synthetic construct
  source 1..21: mol_type = other DNA
  modified_base 1: mod_base = OTHER; note = uridine-3'-phosphate
  modified_base 2: mod_base = OTHER; note = adenosine-3'-phosphate
  modified_base 3: mod_base = OTHER; note = cytidine-3'-phosphate
  modified_base 4: mod_base = OTHER; note = cytidine-3'-phosphate
  modified_base 5: mod_base = OTHER; note = cytidine-3'-phosphate
  modified_base 6: mod_base = OTHER; note = guanosine-3'-phosphate
  modified_base 7: mod_base = OTHER; note = cytidine-3'-phosphate
  modified_base 8: mod_base = OTHER; note = cytidine-3'-phosphate
  modified_base 9: mod_base = OTHER; note = guanosine-3'-phosphate
  modified_base 10: mod_base = OTHER; note = guanosine-3'-phosphate
  modified_base 11: mod_base = OTHER; note = guanosine-3'-phosphate
  modified_base 12: mod_base = OTHER; note = adenosine-3'-phosphate
  modified_base 13: mod_base = OTHER; note = adenosine-3'-phosphate
  modified_base 14: mod_base = OTHER; note = uridine-3'-phosphate
  modified_base 15: mod_base = OTHER; note = cytidine-3'-phosphate
  modified_base 16: mod_base = OTHER; note = uridine-3'-phosphate
  modified_base 17: mod_base = OTHER; note = adenosine-3'-phosphate
  modified_base 18: mod_base = OTHER; note = guanosine-3'-phosphate
  modified_base 19: mod_base = OTHER; note = uridine-3'-phosphate
  misc_feature 1..19: note = RNA
  misc_feature 20..21: note = DNA
tacccgccgggaatctagttt

SEQ ID NO: 785 - DNA, 21 bp, synthetic construct
  source 1..21: mol_type = other DNA
  modified_base 1: mod_base = OTHER; note = cytidine-3'-phosphate
  modified_base 2: mod_base = OTHER; note = cytidine-3'-phosphate
  modified_base 3: mod_base = OTHER; note = guanosine-3'-phosphate
  modified_base 4: mod_base = OTHER; note = guanosine-3'-phosphate
  modified_base 5: mod_base = OTHER; note = guanosine-3'-phosphate
  modified_base 6: mod_base = OTHER; note = adenosine-3'-phosphate
  modified_base 7: mod_base = OTHER; note = adenosine-3'-phosphate
  modified_base 8: mod_base = OTHER; note = uridine-3'-phosphate
  modified_base 9: mod_base = OTHER; note = cytidine-3'-phosphate
  modified_base 10: mod_base = OTHER; note = uridine-3'-phosphate
  modified_base 11: mod_base = OTHER; note = adenosine-3'-phosphate
  modified_base 12: mod_base = OTHER; note = guanosine-3'-phosphate
  modified_base 13: mod_base = OTHER; note = uridine-3'-phosphate
  modified_base 14: mod_base = OTHER; note = guanosine-3'-phosphate
  modified_base 15: mod_base = OTHER; note = cytidine-3'-phosphate
  modified_base 16: mod_base = OTHER; note = cytidine-3'-phosphate
  modified_base 17: mod_base = OTHER; note = uridine-3'-phosphate
  modified_base 18: mod_base = OTHER; note = uridine-3'-phosphate
  modified_base 19: mod_base = OTHER; note = cytidine-3'-phosphate
  misc_feature 1..19: note = RNA
  misc_feature 20..21: note = DNA
ccgggaatctagtgccttctt

SEQ ID NO: 786 - DNA, 21 bp, synthetic construct
  source 1..21: mol_type = other DNA
  modified_base 1: mod_base = OTHER; note = adenosine-3'-phosphate
  modified_base 2: mod_base = OTHER; note = guanosine-3'-phosphate
  modified_base 3: mod_base = OTHER; note = uridine-3'-phosphate
  modified_base 4: mod_base = OTHER; note = guanosine-3'-phosphate
  modified_base 5: mod_base = OTHER; note = cytidine-3'-phosphate
  modified_base 6: mod_base = OTHER; note = cytidine-3'-phosphate
  modified_base 7: mod_base = OTHER; note = uridine-3'-phosphate
  modified_base 8: mod_base = OTHER; note = uridine-3'-phosphate
  modified_base 9: mod_base = OTHER; note = cytidine-3'-phosphate
  modified_base 10: mod_base = OTHER; note = cytidine-3'-phosphate
  modified_base 11: mod_base = OTHER; note = guanosine-3'-phosphate
  modified_base 12: mod_base = OTHER; note = cytidine-3'-phosphate
  modified_base 13: mod_base = OTHER; note = adenosine-3'-phosphate
  modified_base 14: mod_base = OTHER; note = guanosine-3'-phosphate
  modified_base 15: mod_base = OTHER; note = uridine-3'-phosphate
  modified_base 16: mod_base = OTHER; note = guanosine-3'-phosphate
  modified_base 17: mod_base = OTHER; note = adenosine-3'-phosphate
  modified_base 18: mod_base = OTHER; note = adenosine-3'-phosphate
  modified_base 19: mod_base = OTHER; note = adenosine-3'-phosphate
  misc_feature 1..19: note = RNA
  misc_feature 20..21: note = DNA
agtgccttccgcagtgaaatt

SEQ ID NO: 787 - DNA, 21 bp, synthetic construct
  source 1..21: mol_type = other DNA
  modified_base 1: mod_base = OTHER; note = guanosine-3'-phosphate
  modified_base 2: mod_base = OTHER; note = uridine-3'-phosphate
  modified_base 3: mod_base = OTHER; note = guanosine-3'-phosphate
  modified_base 4: mod_base = OTHER; note = adenosine-3'-phosphate
  modified_base 5: mod_base = OTHER; note = adenosine-3'-phosphate
  modified_base 6: mod_base = OTHER; note = adenosine-3'-phosphate
  modified_base 7: mod_base = OTHER; note = cytidine-3'-phosphate
  modified_base 8: mod_base = OTHER; note = cytidine-3'-phosphate
  modified_base 9: mod_base = OTHER; note = guanosine-3'-phosphate
  modified_base 10: mod_base = OTHER; note = cytidine-3'-phosphate
  modified_base 11: mod_base = OTHER; note = cytidine-3'-phosphate
  modified_base 12: mod_base = OTHER; note = adenosine-3'-phosphate
  modified_base 13: mod_base = OTHER; note = adenosine-3'-phosphate
  modified_base 14: mod_base = OTHER; note = adenosine-3'-phosphate
  modified_base 15: mod_base = OTHER; note = guanosine-3'-phosphate
  modified_base 16: mod_base = OTHER; note = cytidine-3'-phosphate
  modified_base 17: mod_base = OTHER; note = cytidine-3'-phosphate
  modified_base 18: mod_base = OTHER; note = cytidine-3'-phosphate
  modified_base 19: mod_base = OTHER; note = adenosine-3'-phosphate
  misc_feature 1..19: note = RNA
  misc_feature 20..21: note = DNA
gtgaaaccgccaaagcccatt

SEQ ID NO: 788 - DNA, 21 bp, synthetic construct
  source 1..21: mol_type = other DNA
  modified_base 1: mod_base = OTHER; note = cytidine-3'-phosphate
  modified_base 2: mod_base = OTHER; note = guanosine-3'-phosphate
  modified_base 3: mod_base = OTHER; note = cytidine-3'-phosphate
  modified_base 4: mod_base = OTHER; note = cytidine-3'-phosphate
  modified_base 5: mod_base = OTHER; note = adenosine-3'-phosphate
  modified_base 6: mod_base = OTHER; note = adenosine-3'-phosphate
  modified_base 7: mod_base = OTHER; note = adenosine-3'-phosphate
  modified_base 8: mod_base = OTHER; note = guanosine-3'-phosphate
  modified_base 9: mod_base = OTHER; note = cytidine-3'-phosphate
  modified_base 10: mod_base = OTHER; note = cytidine-3'-phosphate
  modified_base 11: mod_base = OTHER; note = cytidine-3'-phosphate
  modified_base 12: mod_base = OTHER; note = adenosine-3'-phosphate
  modified_base 13: mod_base = OTHER; note = guanosine-3'-phosphate
  modified_base 14: mod_base = OTHER; note = adenosine-3'-phosphate
  modified_base 15: mod_base = OTHER; note = adenosine-3'-phosphate
  modified_base 16: mod_base = OTHER; note = guanosine-3'-phosphate
  modified_base 17: mod_base = OTHER; note = adenosine-3'-phosphate
  modified_base 18: mod_base = OTHER; note = uridine-3'-phosphate
  modified_base 19: mod_base = OTHER; note = guanosine-3'-phosphate
  misc_feature 1..19: note = RNA
  misc_feature 20..21: note = DNA
cgccaaagcccagaagatgtt

SEQ ID NO: 789 - DNA, 21 bp, synthetic construct
  source 1..21: mol_type = other DNA
  modified_base 1: mod_base = OTHER; note = cytidine-3'-phosphate
  modified_base 2: mod_base = OTHER; note = adenosine-3'-phosphate
  modified_base 3: mod_base = OTHER; note = guanosine-3'-phosphate
  modified_base 4: mod_base = OTHER; note = adenosine-3'-phosphate
  modified_base 5: mod_base = OTHER; note = adenosine-3'-phosphate
  modified_base 6: mod_base = OTHER; note = guanosine-3'-phosphate
  modified_base 7: mod_base = OTHER; note = adenosine-3'-phosphate
  modified_base 8: mod_base = OTHER; note = uridine-3'-phosphate
  modified_base 9: mod_base = OTHER; note = guanosine-3'-phosphate
  modified_base 10: mod_base = OTHER; note = cytidine-3'-phosphate
  modified_base 11: mod_base = OTHER; note = uridine-3'-phosphate
  modified_base 12: mod_base = OTHER; note = cytidine-3'-phosphate
  modified_base 13: mod_base = OTHER; note = adenosine-3'-phosphate
  modified_base 14: mod_base = OTHER; note = adenosine-3'-phosphate
  modified_base 15: mod_base = OTHER; note = guanosine-3'-phosphate
  modified_base 16: mod_base = OTHER; note = guanosine-3'-phosphate
  modified_base 17: mod_base = OTHER; note = adenosine-3'-phosphate
  modified_base 18: mod_base = OTHER; note = guanosine-3'-phosphate
  modified_base 19: mod_base = OTHER; note = cytidine-3'-phosphate
  misc_feature 1..19: note = RNA
  misc_feature 20..21: note = DNA
cagaagatgctcaaggagctt

SEQ ID NO: 790 - DNA, 21 bp, synthetic construct
  source 1..21: mol_type = other DNA
  modified_base 1: mod_base = OTHER; note = uridine-3'-phosphate
  modified_base 2: mod_base = OTHER; note = cytidine-3'-phosphate
  modified_base 3: mod_base = OTHER; note = adenosine-3'-phosphate
  modified_base 4: mod_base = OTHER; note = adenosine-3'-phosphate
  modified_base 5: mod_base = OTHER; note = guanosine-3'-phosphate
  modified_base 6: mod_base = OTHER; note = guanosine-3'-phosphate
  modified_base 7: mod_base = OTHER; note = adenosine-3'-phosphate
  modified_base 8: mod_base = OTHER; note = guanosine-3'-phosphate
  modified_base 9: mod_base = OTHER; note = cytidine-3'-phosphate
  modified_base 10: mod_base = OTHER; note = uridine-3'-phosphate
  modified_base 11: mod_base = OTHER; note = cytidine-3'-phosphate
  modified_base 12: mod_base = OTHER; note = adenosine-3'-phosphate
  modified_base 13: mod_base = OTHER; note = uridine-3'-phosphate
  modified_base 14: mod_base = OTHER; note = cytidine-3'-phosphate
  modified_base 15: mod_base = OTHER; note = adenosine-3'-phosphate
  modified_base 16: mod_base = OTHER; note = cytidine-3'-phosphate
  modified_base 17: mod_base = OTHER; note = cytidine-3'-phosphate
  modified_base 18: mod_base = OTHER; note = adenosine-3'-phosphate
  modified_base 19: mod_base = OTHER; note = guanosine-3'-phosphate
  misc_feature 1..19: note = RNA
  misc_feature 20..21: note = DNA
tcaaggagctcatcaccagtt

SEQ ID NO: 791 - DNA, 21 bp, synthetic construct
  source 1..21: mol_type = other DNA
  modified_base 1: mod_base = OTHER; note = adenosine-3'-phosphate
  modified_base 2: mod_base = OTHER; note = cytidine-3'-phosphate
  modified_base 3: mod_base = OTHER; note = cytidine-3'-phosphate
  modified_base 4: mod_base = OTHER; note = adenosine-3'-phosphate
  modified_base 5: mod_base = OTHER; note = guanosine-3'-phosphate
  modified_base 6: mod_base = OTHER; note = cytidine-3'-phosphate
  modified_base 7: mod_base = OTHER; note = adenosine-3'-phosphate
  modified_base 8: mod_base = OTHER; note = cytidine-3'-phosphate
  modified_base 9: mod_base = OTHER; note = cytidine-3'-phosphate
  modified_base 10: mod_base = OTHER; note = cytidine-3'-phosphate
  modified_base 11: mod_base = OTHER; note = guanosine-3'-phosphate
  modified_base 12: mod_base = OTHER; note = cytidine-3'-phosphate
  modified_base 13: mod_base = OTHER; note = cytidine-3'-phosphate
  modified_base 14: mod_base = OTHER; note = uridine-3'-phosphate
  modified_base 15: mod_base = OTHER; note = guanosine-3'-phosphate
  modified_base 16: mod_base = OTHER; note = guanosine-3'-phosphate
  modified_base 17: mod_base = OTHER; note = guanosine-3'-phosphate
  modified_base 18: mod_base = OTHER; note = adenosine-3'-phosphate
  modified_base 19: mod_base = OTHER; note = adenosine-3'-phosphate
  misc_feature 1..19: note = RNA
  misc_feature 20..21: note = DNA
accagcacccgcctgggaatt

SEQ ID NO: 792 - DNA, 21 bp, synthetic construct
  source 1..21: mol_type = other DNA
  modified_base 1: mod_base = OTHER; note = guanosine-3'-phosphate
  modified_base 2: mod_base = OTHER; note = cytidine-3'-phosphate
  modified_base 3: mod_base = OTHER; note = cytidine-3'-phosphate
  modified_base 4: mod_base = OTHER; note = uridine-3'-phosphate
  modified_base 5: mod_base = OTHER; note = guanosine-3'-phosphate
  modified_base 6: mod_base = OTHER; note = guanosine-3'-phosphate
  modified_base 7: mod_base = OTHER; note = guanosine-3'-phosphate
  modified_base 8: mod_base = OTHER; note = adenosine-3'-phosphate
  modified_base 9: mod_base = OTHER; note = adenosine-3'-phosphate
  modified_base 10: mod_base = OTHER; note = cytidine-3'-phosphate
  modified_base 11: mod_base = OTHER; note = uridine-3'-phosphate
  modified_base 12: mod_base = OTHER; note = uridine-3'-phosphate
  modified_base 13: mod_base = OTHER; note = adenosine-3'-phosphate
  modified_base 14: mod_base = OTHER; note = cytidine-3'-phosphate
  modified_base 15: mod_base = OTHER; note = uridine-3'-phosphate
  modified_base 16: mod_base = OTHER; note = adenosine-3'-phosphate
  modified_base 17: mod_base = OTHER; note = cytidine-3'-phosphate
  modified_base 18: mod_base = OTHER; note = adenosine-3'-phosphate
  modified_base 19: mod_base = OTHER; note = adenosine-3'-phosphate
  misc_feature 1..19: note = RNA
  misc_feature 20..21: note = DNA
gcctgggaacttactacaatt

SEQ ID NO: 793 - DNA, 21 bp, synthetic construct
  source 1..21: mol_type = other DNA
  modified_base 1: mod_base = OTHER; note = guanosine-3'-phosphate
  modified_base 2: mod_base = OTHER; note = adenosine-3'-phosphate
  modified_base 3: mod_base = OTHER; note = adenosine-3'-phosphate
  modified_base 4: mod_base = OTHER; note = cytidine-3'-phosphate
  modified_base 5: mod_base = OTHER; note = uridine-3'-phosphate
  modified_base 6: mod_base = OTHER; note = uridine-3'-phosphate
  modified_base 7: mod_base = OTHER; note = adenosine-3'-phosphate
  modified_base 8: mod_base = OTHER; note = cytidine-3'-phosphate
  modified_base 9: mod_base = OTHER; note = uridine-3'-phosphate
  modified_base 10: mod_base = OTHER; note = adenosine-3'-phosphate
  modified_base 11: mod_base = OTHER; note = cytidine-3'-phosphate
  modified_base 12: mod_base = OTHER; note = adenosine-3'-phosphate
  modified_base 13: mod_base = OTHER; note = adenosine-3'-phosphate
  modified_base 14: mod_base = OTHER; note = cytidine-3'-phosphate
  modified_base 15: mod_base = OTHER; note = uridine-3'-phosphate
  modified_base 16: mod_base = OTHER; note = cytidine-3'-phosphate
  modified_base 17: mod_base = OTHER; note = cytidine-3'-phosphate
  modified_base 18: mod_base = OTHER; note = adenosine-3'-phosphate
  modified_base 19: mod_base = OTHER; note = guanosine-3'-phosphate
  misc_feature 1..19: note = RNA
  misc_feature 20..21: note = DNA
gaacttactacaactccagtt

SEQ ID NO: 794 - DNA, 21 bp, synthetic construct
  source 1..21: mol_type = other DNA
  modified_base 1: mod_base = OTHER; note = adenosine-3'-phosphate
  modified_base 2: mod_base = OTHER; note = adenosine-3'-phosphate
  modified_base 3: mod_base = OTHER; note = cytidine-3'-phosphate
  modified_base 4: mod_base = OTHER; note = uridine-3'-phosphate
  modified_base 5: mod_base = OTHER; note = cytidine-3'-phosphate
  modified_base 6: mod_base = OTHER; note = cytidine-3'-phosphate
  modified_base 7: mod_base = OTHER; note = adenosine-3'-phosphate
  modified_base 8: mod_base = OTHER; note = guanosine-3'-phosphate
  modified_base 9: mod_base = OTHER; note = cytidine-3'-phosphate
  modified_base 10: mod_base = OTHER; note = uridine-3'-phosphate
  modified_base 11: mod_base = OTHER; note = cytidine-3'-phosphate
  modified_base 12: mod_base = OTHER; note = cytidine-3'-phosphate
  modified_base 13: mod_base = OTHER; note = guanosine-3'-phosphate
  modified_base 14: mod_base = OTHER; note = uridine-3'-phosphate
  modified_base 15: mod_base = OTHER; note = cytidine-3'-phosphate
  modified_base 16: mod_base = OTHER; note = uridine-3'-phosphate
  modified_base 17: mod_base = OTHER; note = adenosine-3'-phosphate
  modified_base 18: mod_base = OTHER; note = uridine-3'-phosphate
  modified_base 19: mod_base = OTHER; note = uridine-3'-phosphate
  misc_feature 1..19: note = RNA
  misc_feature 20..21: note = DNA
aactccagctccgtctatttt

SEQ ID NO: 795 - DNA, 21 bp, synthetic construct
  source 1..21: mol_type = other DNA
  modified_base 1: mod_base = OTHER; note = cytidine-3'-phosphate
  modified_base 2: mod_base = OTHER; note = cytidine-3'-phosphate
  modified_base 3: mod_base = OTHER; note = guanosine-3'-phosphate
  modified_base 4: mod_base = OTHER; note = uridine-3'-phosphate
  modified_base 5: mod_base = OTHER; note = cytidine-3'-phosphate
  modified_base 6: mod_base = OTHER; note = uridine-3'-phosphate
  modified_base 7: mod_base = OTHER; note = adenosine-3'-phosphate
  modified_base 8: mod_base = OTHER; note = uridine-3'-phosphate
  modified_base 9: mod_base = OTHER; note = uridine-3'-phosphate
  modified_base 10: mod_base = OTHER; note = cytidine-3'-phosphate
  modified_base 11: mod_base = OTHER; note = cytidine-3'-phosphate
  modified_base 12: mod_base = OTHER; note = uridine-3'-phosphate
  modified_base 13: mod_base = OTHER; note = uridine-3'-phosphate
  modified_base 14: mod_base = OTHER; note = uridine-3'-phosphate
  modified_base 15: mod_base = OTHER; note = guanosine-3'-phosphate
  modified_base 16: mod_base = OTHER; note = guanosine-3'-phosphate
  modified_base 17: mod_base = OTHER; note = guanosine-3'-phosphate
  modified_base 18: mod_base = OTHER; note = guanosine-3'-phosphate
  modified_base 19: mod_base = OTHER; note = adenosine-3'-phosphate
  misc_feature 1..19: note = RNA
  misc_feature 20..21: note = DNA
ccgtctattcctttggggatt

SEQ ID NO: 796 - DNA, 21 bp, synthetic construct
  source 1..21: mol_type = other DNA
  modified_base 1: mod_base = OTHER; note = uridine-3'-phosphate
  modified_base 2: mod_base = OTHER; note = uridine-3'-phosphate
  modified_base 3: mod_base = OTHER; note = guanosine-3'-phosphate
  modified_base 4: mod_base = OTHER; note = guanosine-3'-phosphate
  modified_base 5: mod_base = OTHER; note = guanosine-3'-phosphate
  modified_base 6: mod_base = OTHER; note = guanosine-3'-phosphate
  modified_base 7: mod_base = OTHER; note = adenosine-3'-phosphate
  modified_base 8: mod_base = OTHER; note = guanosine-3'-phosphate
  modified_base 9: mod_base = OTHER; note = guanosine-3'-phosphate
  modified_base 10: mod_base = OTHER; note = guanosine-3'-phosphate
  modified_base 11: mod_base = OTHER; note = adenosine-3'-phosphate
  modified_base 12: mod_base = OTHER; note = cytidine-3'-phosphate
  modified_base 13: mod_base = OTHER; note = cytidine-3'-phosphate
  modified_base 14: mod_base = OTHER; note = cytidine-3'-phosphate
  modified_base 15: mod_base = OTHER; note = cytidine-3'-phosphate
  modified_base 16: mod_base = OTHER; note = uridine-3'-phosphate
  modified_base 17: mod_base = OTHER; note = cytidine-3'-phosphate
  modified_base 18: mod_base = OTHER; note = adenosine-3'-phosphate
  modified_base 19: mod_base = OTHER; note = cytidine-3'-phosphate
  misc_feature 1..19: note = RNA
  misc_feature 20..21: note = DNA
ttggggagggacccctcactt

SEQ ID NO: 797 - DNA, 21 bp, synthetic construct
  source 1..21: mol_type = other DNA
  modified_base 1: mod_base = OTHER; note = cytidine-3'-phosphate
  modified_base 2: mod_base = OTHER; note = cytidine-3'-phosphate
  modified_base 3: mod_base = OTHER; note = cytidine-3'-phosphate
  modified_base 4: mod_base = OTHER; note = cytidine-3'-phosphate
  modified_base 5: mod_base = OTHER; note = uridine-3'-phosphate
  modified_base 6: mod_base = OTHER; note = cytidine-3'-phosphate
  modified_base 7: mod_base = OTHER; note = adenosine-3'-phosphate
  modified_base 8: mod_base = OTHER; note = cytidine-3'-phosphate
  modified_base 9: mod_base = OTHER; note = cytidine-3'-phosphate
  modified_base 10: mod_base = OTHER; note = uridine-3'-phosphate
  modified_base 11: mod_base = OTHER; note = guanosine-3'-phosphate
  modified_base 12: mod_base = OTHER; note = cytidine-3'-phosphate
  modified_base 13: mod_base = OTHER; note = uridine-3'-phosphate
  modified_base 14: mod_base = OTHER; note = uridine-3'-phosphate
  modified_base 15: mod_base = OTHER; note = cytidine-3'-phosphate
  modified_base 16: mod_base = OTHER; note = uridine-3'-phosphate
  modified_base 17: mod_base = OTHER; note = uridine-3'-phosphate
  modified_base 18: mod_base = OTHER; note = cytidine-3'-phosphate
  modified_base 19: mod_base = OTHER; note = uridine-3'-phosphate
  misc_feature 1..19: note = RNA
  misc_feature 20..21: note = DNA
cccctcacctgcttcttcttt

SEQ ID NO: 798 - DNA, 21 bp, synthetic construct
  source 1..21: mol_type = other DNA
  modified_base 1: mod_base = OTHER; note = cytidine-3'-phosphate
  modified_base 2: mod_base = OTHER; note = uridine-3'-phosphate
  modified_base 3: mod_base = OTHER; note = guanosine-3'-phosphate
  modified_base 4: mod_base = OTHER; note = cytidine-3'-phosphate
  modified_base 5: mod_base = OTHER; note = uridine-3'-phosphate
  modified_base 6: mod_base = OTHER; note = uridine-3'-phosphate
  modified_base 7: mod_base = OTHER; note = cytidine-3'-phosphate
  modified_base 8: mod_base = OTHER; note = uridine-3'-phosphate
  modified_base 9: mod_base = OTHER; note = uridine-3'-phosphate
  modified_base 10: mod_base = OTHER; note = cytidine-3'-phosphate
  modified_base 11: mod_base = OTHER; note = uridine-3'-phosphate
  modified_base 12: mod_base = OTHER; note = guanosine-3'-phosphate
  modified_base 13: mod_base = OTHER; note = guanosine-3'-phosphate
  modified_base 14: mod_base = OTHER; note = uridine-3'-phosphate
  modified_base 15: mod_base = OTHER; note = uridine-3'-phosphate
  modified_base 16: mod_base = OTHER; note = cytidine-3'-phosphate
  modified_base 17: mod_base = OTHER; note = adenosine-3'-phosphate
  modified_base 18: mod_base = OTHER; note = uridine-3'-phosphate
  modified_base 19: mod_base = OTHER; note = uridine-3'-phosphate
  misc_feature 1..19: note = RNA
  misc_feature 20..21: note = DNA
ctgcttcttctggttcatttt

SEQ ID NO: 799 - DNA, 21 bp, synthetic construct
  source 1..21: mol_type = other DNA
  modified_base 1: mod_base = OTHER; note = cytidine-3'-phosphate
  modified_base 2: mod_base = OTHER; note = uridine-3'-phosphate
  modified_base 3: mod_base = OTHER; note = guanosine-3'-phosphate
  modified_base 4: mod_base = OTHER; note = guanosine-3'-phosphate
  modified_base 5: mod_base = OTHER; note = uridine-3'-phosphate
  modified_base 6: mod_base = OTHER; note = uridine-3'-phosphate
  modified_base 7: mod_base = OTHER; note = cytidine-3'-phosphate
  modified_base 8: mod_base = OTHER; note = adenosine-3'-phosphate
  modified_base 9: mod_base = OTHER; note = uridine-3'-phosphate
  modified_base 10: mod_base = OTHER; note = uridine-3'-phosphate
  modified_base 11: mod_base = OTHER; note = cytidine-3'-phosphate
  modified_base 12: mod_base = OTHER; note = uridine-3'-phosphate
  modified_base 13: mod_base = OTHER; note = cytidine-3'-phosphate
  modified_base 14: mod_base = OTHER; note = cytidine-3'-phosphate
  modified_base 15: mod_base = OTHER; note = adenosine-3'-phosphate
  modified_base 16: mod_base = OTHER; note = adenosine-3'-phosphate
  modified_base 17: mod_base = OTHER; note = adenosine-3'-phosphate
  modified_base 18: mod_base = OTHER; note = uridine-3'-phosphate
  modified_base 19: mod_base = OTHER; note = cytidine-3'-phosphate
  misc_feature 1..19: note = RNA
  misc_feature 20..21: note = DNA
ctggttcattctccaaatctt

SEQ ID NO: 800 - DNA, 21 bp, synthetic construct
  source 1..21: mol_type = other DNA
  modified_base 1: mod_base = OTHER; note = uridine-3'-phosphate
  modified_base 2: mod_base = OTHER; note = cytidine-3'-phosphate
  modified_base 3: mod_base = OTHER; note = uridine-3'-phosphate
  modified_base 4: mod_base = OTHER; note = cytidine-3'-phosphate
  modified_base 5: mod_base = OTHER; note = cytidine-3'-phosphate
  modified_base 6: mod_base = OTHER; note = adenosine-3'-phosphate
  modified_base 7: mod_base = OTHER; note = adenosine-3'-phosphate
  modified_base 8: mod_base = OTHER; note = adenosine-3'-phosphate
  modified_base 9: mod_base = OTHER; note = uridine-3'-phosphate
  modified_base 10: mod_base = OTHER; note = cytidine-3'-phosphate
  modified_base 11: mod_base = OTHER; note = cytidine-3'-phosphate
  modified_base 12: mod_base = OTHER; note = cytidine-3'-phosphate
  modified_base 13: mod_base = OTHER; note = cytidine-3'-phosphate
  modified_base 14: mod_base = OTHER; note = guanosine-3'-phosphate
  modified_base 15: mod_base = OTHER; note = adenosine-3'-phosphate
  modified_base 16: mod_base = OTHER; note = guanosine-3'-phosphate
  modified_base 17: mod_base = OTHER; note = cytidine-3'-phosphate
  modified_base 18: mod_base = OTHER; note = adenosine-3'-phosphate
  modified_base 19: mod_base = OTHER; note = cytidine-3'-phosphate
  misc_feature 1..19: note = RNA
  misc_feature 20..21: note = DNA
tctccaaatccccgagcactt

SEQ ID NO: 801 - DNA, 21 bp, synthetic construct
  source 1..21: mol_type = other DNA
  modified_base 1: mod_base = OTHER; note = cytidine-3'-phosphate
  modified_base 2: mod_base = OTHER; note = cytidine-3'-phosphate
  modified_base 3: mod_base = OTHER; note = guanosine-3'-phosphate
  modified_base 4: mod_base = OTHER; note = adenosine-3'-phosphate
  modified_base 5: mod_base = OTHER; note = guanosine-3'-phosphate
  modified_base 6: mod_base = OTHER; note = cytidine-3'-phosphate
  modified_base 7: mod_base = OTHER; note = adenosine-3'-phosphate
  modified_base 8: mod_base = OTHER; note = cytidine-3'-phosphate
  modified_base 9: mod_base = OTHER; note = cytidine-3'-phosphate
  modified_base 10: mod_base = OTHER; note = guanosine-3'-phosphate
  modified_base 11: mod_base = OTHER; note = cytidine-3'-phosphate
  modified_base 12: mod_base = OTHER; note = cytidine-3'-phosphate
  modified_base 13: mod_base = OTHER; note = guanosine-3'-phosphate
  modified_base 14: mod_base = OTHER; note = guanosine-3'-phosphate
  modified_base 15: mod_base = OTHER; note = cytidine-3'-phosphate
  modified_base 16: mod_base = OTHER; note = uridine-3'-phosphate
  modified_base 17: mod_base = OTHER; note = guanosine-3'-phosphate
  modified_base 18: mod_base = OTHER; note = adenosine-3'-phosphate
  modified_base 19: mod_base = OTHER; note = uridine-3'-phosphate
  misc_feature 1..19: note = RNA
  misc_feature 20..21: note = DNA
ccgagcaccgccggctgattt

SEQ ID NO: 802 - DNA, 21 bp, synthetic construct
  source 1..21: mol_type = other DNA
  modified_base 1: mod_base = OTHER; note = guanosine-3'-phosphate
  modified_base 2: mod_base = OTHER; note = guanosine-3'-phosphate
  modified_base 3: mod_base = OTHER; note = cytidine-3'-phosphate
  modified_base 4: mod_base = OTHER; note = uridine-3'-phosphate
  modified_base 5: mod_base = OTHER; note = guanosine-3'-phosphate
  modified_base 6: mod_base = OTHER; note = adenosine-3'-phosphate
  modified_base 7: mod_base = OTHER; note = uridine-3'-phosphate
  modified_base 8: mod_base = OTHER; note = guanosine-3'-phosphate
  modified_base 9: mod_base = OTHER; note = cytidine-3'-phosphate
  modified_base 10: mod_base = OTHER; note = uridine-3'-phosphate
  modified_base 11: mod_base = OTHER; note = guanosine-3'-phosphate
  modified_base 12: mod_base = OTHER; note = adenosine-3'-phosphate
  modified_base 13: mod_base = OTHER; note = guanosine-3'-phosphate
  modified_base 14: mod_base = OTHER; note = cytidine-3'-phosphate
  modified_base 15: mod_base = OTHER; note = cytidine-3'-phosphate
  modified_base 16: mod_base = OTHER; note = cytidine-3'-phosphate
  modified_base 17: mod_base = OTHER; note = cytidine-3'-phosphate
  modified_base 18: mod_base = OTHER; note = guanosine-3'-phosphate
  modified_base 19: mod_base = OTHER; note = adenosine-3'-phosphate
  misc_feature 1..19: note = RNA
  misc_feature 20..21: note = DNA
ggctgatgctgagccccgatt

SEQ ID NO: 803 - DNA, 21 bp, synthetic construct
  source 1..21: mol_type = other DNA
  modified_base 1: mod_base = OTHER; note = uridine-3'-phosphate
  modified_base 2: mod_base = OTHER; note = guanosine-3'-phosphate
  modified_base 3: mod_base = OTHER; note = adenosine-3'-phosphate
  modified_base 4: mod_base = OTHER; note = guanosine-3'-phosphate
  modified_base 5: mod_base = OTHER; note = cytidine-3'-phosphate
  modified_base 6: mod_base = OTHER; note = cytidine-3'-phosphate
  modified_base 7: mod_base = OTHER; note = cytidine-3'-phosphate
  modified_base 8: mod_base = OTHER; note = cytidine-3'-phosphate
  modified_base 9: mod_base = OTHER; note = guanosine-3'-phosphate
  modified_base 10: mod_base = OTHER; note = adenosine-3'-phosphate
  modified_base 11: mod_base = OTHER; note = guanosine-3'-phosphate
  modified_base 12: mod_base = OTHER; note = guanosine-3'-phosphate
  modified_base 13: mod_base = OTHER; note = uridine-3'-phosphate
  modified_base 14: mod_base = OTHER; note = guanosine-3'-phosphate
  modified_base 15: mod_base = OTHER; note = guanosine-3'-phosphate
  modified_base 16: mod_base = OTHER; note = uridine-3'-phosphate
  modified_base 17: mod_base = OTHER; note = guanosine-3'-phosphate
  modified_base 18: mod_base = OTHER; note = cytidine-3'-phosphate
  modified_base 19: mod_base = OTHER; note = adenosine-3'-phosphate
  misc_feature 1..19: note = RNA
  misc_feature 20..21: note = DNA
tgagccccgaggtggtgcatt

SEQ ID NO: 804 - DNA, 21 bp, synthetic construct
  source 1..21: mol_type = other DNA
  modified_base 1: mod_base = OTHER; note = uridine-3'-phosphate
  modified_base 2: mod_base = OTHER; note = guanosine-3'-phosphate
  modified_base 3: mod_base = OTHER; note = guanosine-3'-phosphate
  modified_base 4: mod_base = OTHER; note = uridine-3'-phosphate
  modified_base 5: mod_base = OTHER; note = guanosine-3'-phosphate
  modified_base 6: mod_base = OTHER; note = cytidine-3'-phosphate
  modified_base 7: mod_base = OTHER; note = adenosine-3'-phosphate
  modified_base 8: mod_base = OTHER; note = guanosine-3'-phosphate
  modified_base 9: mod_base = OTHER; note = guanosine-3'-phosphate
  modified_base 10: mod_base = OTHER; note = cytidine-3'-phosphate
  modified_base 11: mod_base = OTHER; note = adenosine-3'-phosphate
  modified_base 12: mod_base = OTHER; note = cytidine-3'-phosphate
  modified_base 13: mod_base = OTHER; note = uridine-3'-phosphate
  modified_base 14: mod_base = OTHER; note = guanosine-3'-phosphate
  modified_base 15: mod_base = OTHER; note = cytidine-3'-phosphate
  modified_base 16: mod_base = OTHER; note = uridine-3'-phosphate
  modified_base 17: mod_base = OTHER; note = guanosine-3'-phosphate
  modified_base 18: mod_base = OTHER; note = guanosine-3'-phosphate
  modified_base 19: mod_base = OTHER; note = uridine-3'-phosphate
  misc_feature 1..19: note = RNA
  misc_feature 20..21: note = DNA
tggtgcaggcactgctggttt

SEQ ID NO: 805 - DNA, 21 bp, synthetic construct
  source 1..21: mol_type = other DNA
  modified_base 1: mod_base = OTHER; note = adenosine-3'-phosphate
  modified_base 2: mod_base = OTHER; note = guanosine-3'-phosphate
  modified_base 3: mod_base = OTHER; note = guanosine-3'-phosphate
  modified_base 4: mod_base = OTHER; note = cytidine-3'-phosphate
  modified_base 5: mod_base = OTHER; note = adenosine-3'-phosphate
  modified_base 6: mod_base = OTHER; note = cytidine-3'-phosphate
  modified_base 7: mod_base = OTHER; note = uridine-3'-phosphate
  modified_base 8: mod_base = OTHER; note = guanosine-3'-phosphate
  modified_base 9: mod_base = OTHER; note = cytidine-3'-phosphate
  modified_base 10: mod_base = OTHER; note = uridine-3'-phosphate
  modified_base 11: mod_base = OTHER; note = guanosine-3'-phosphate
  modified_base 12: mod_base = OTHER; note = guanosine-3'-phosphate
  modified_base 13: mod_base = OTHER; note = uridine-3'-phosphate
  modified_base 14: mod_base = OTHER; note = guanosine-3'-phosphate
  modified_base 15: mod_base = OTHER; note = guanosine-3'-phosphate
  modified_base 16: mod_base = OTHER; note = adenosine-3'-phosphate
  modified_base 17: mod_base = OTHER; note = guanosine-3'-phosphate
  modified_base 18: mod_base = OTHER; note = guanosine-3'-phosphate
  modified_base 19: mod_base = OTHER; note = adenosine-3'-phosphate
  misc_feature 1..19: note = RNA
  misc_feature 20..21: note = DNA
aggcactgctggtggaggatt

SEQ ID NO: 806 - DNA, 21 bp, synthetic construct
  source 1..21: mol_type = other DNA
  modified_base 1: mod_base = OTHER; note = guanosine-3'-phosphate
  modified_base 2: mod_base = OTHER; note = uridine-3'-phosphate
  modified_base 3: mod_base = OTHER; note = guanosine-3'-phosphate
  modified_base 4: mod_base = OTHER; note = guanosine-3'-phosphate
  modified_base 5: mod_base = OTHER; note = adenosine-3'-phosphate
  modified_base 6: mod_base = OTHER; note = guanosine-3'-phosphate
  modified_base 7: mod_base = OTHER; note = guanosine-3'-phosphate
  modified_base 8: mod_base = OTHER; note = adenosine-3'-phosphate
  modified_base 9: mod_base = OTHER; note = guanosine-3'-phosphate
  modified_base 10: mod_base = OTHER; note = cytidine-3'-phosphate
  modified_base 11: mod_base = OTHER; note = uridine-3'-phosphate
  modified_base 12: mod_base = OTHER; note = guanosine-3'-phosphate
  modified_base 13: mod_base = OTHER; note = cytidine-3'-phosphate
  modified_base 14: mod_base = OTHER; note = uridine-3'-phosphate
  modified_base 15: mod_base = OTHER; note = guanosine-3'-phosphate
  modified_base 16: mod_base = OTHER; note = uridine-3'-phosphate
  modified_base 17: mod_base = OTHER; note = cytidine-3'-phosphate
  modified_base 18: mod_base = OTHER; note = cytidine-3'-phosphate
  modified_base 19: mod_base = OTHER; note = adenosine-3'-phosphate
  misc_feature 1..19: note = RNA
  misc_feature 20..21: note = DNA
gtggaggagctgctgtccatt

SEQ ID NO: 807 - DNA, 21 bp, synthetic construct
  source 1..21: mol_type = other DNA
  modified_base 1: mod_base = OTHER; note = uridine-3'-phosphate
  modified_base 2: mod_base = OTHER; note = guanosine-3'-phosphate
  modified_base 3: mod_base = OTHER; note = uridine-3'-phosphate
  modified_base 4: mod_base = OTHER; note = cytidine-3'-phosphate
  modified_base 5: mod_base = OTHER; note = cytidine-3'-phosphate
  modified_base 6: mod_base = OTHER; note = adenosine-3'-phosphate
  modified_base 7: mod_base = OTHER; note = cytidine-3'-phosphate
  modified_base 8: mod_base = OTHER; note = adenosine-3'-phosphate
  modified_base 9: mod_base = OTHER; note = guanosine-3'-phosphate
  modified_base 10: mod_base = OTHER; note = uridine-3'-phosphate
  modified_base 11: mod_base = OTHER; note = cytidine-3'-phosphate
  modified_base 12: mod_base = OTHER; note = adenosine-3'-phosphate
  modified_base 13: mod_base = OTHER; note = adenosine-3'-phosphate
  modified_base 14: mod_base = OTHER; note = cytidine-3'-phosphate
  modified_base 15: mod_base = OTHER; note = adenosine-3'-phosphate
  modified_base 16: mod_base = OTHER; note = guanosine-3'-phosphate
  modified_base 17: mod_base = OTHER; note = cytidine-3'-phosphate
  modified_base 18: mod_base = OTHER; note = uridine-3'-phosphate
  modified_base 19: mod_base = OTHER; note = cytidine-3'-phosphate
  misc_feature 1..19: note = RNA
  misc_feature 20..21: note = DNA
tgtccacagtcaacagctctt

SEQ ID NO: 808 - DNA, 21 bp, synthetic construct
  source 1..21: mol_type = other DNA
  modified_base 1: mod_base = OTHER; note = uridine-3'-phosphate
  modified_base 2: mod_base = OTHER; note = cytidine-3'-phosphate
  modified_base 3: mod_base = OTHER; note = adenosine-3'-phosphate
  modified_base 4: mod_base = OTHER; note = adenosine-3'-phosphate
  modified_base 5: mod_base = OTHER; note = cytidine-3'-phosphate
  modified_base 6: mod_base = OTHER; note = adenosine-3'-phosphate
  modified_base 7: mod_base = OTHER; note = guanosine-3'-phosphate
  modified_base 8: mod_base = OTHER; note = cytidine-3'-phosphate
  modified_base 9: mod_base = OTHER; note = uridine-3'-phosphate
  modified_base 10: mod_base = OTHER; note = cytidine-3'-phosphate
  modified_base 11: mod_base = OTHER; note = guanosine-3'-phosphate
  modified_base 12: mod_base = OTHER; note = guanosine-3'-phosphate
  modified_base 13: mod_base = OTHER; note = cytidine-3'-phosphate
  modified_base 14: mod_base = OTHER; note = uridine-3'-phosphate
  modified_base 15: mod_base = OTHER; note = guanosine-3'-phosphate
  modified_base 16: mod_base = OTHER; note = cytidine-3'-phosphate
  modified_base 17: mod_base = OTHER; note = cytidine-3'-phosphate
  modified_base 18: mod_base = OTHER; note = guanosine-3'-phosphate
  modified_base 19: mod_base = OTHER; note = uridine-3'-phosphate
  misc_feature 1..19: note = RNA
  misc_feature 20..21: note = DNA
tcaacagctcggctgccgttt

SEQ ID NO: 809 - DNA, 21 bp, synthetic construct
  source 1..21: mol_type = other DNA
  modified_base 1: mod_base = OTHER; note = uridine-3'-phosphate
  modified_base 2: mod_base = OTHER; note = cytidine-3'-phosphate
  modified_base 3: mod_base = OTHER; note = guanosine-3'-phosphate
  modified_base 4: mod_base = OTHER; note = guanosine-3'-phosphate
  modified_base 5: mod_base = OTHER; note = cytidine-3'-phosphate
  modified_base 6: mod_base = OTHER; note = uridine-3'-phosphate
  modified_base 7: mod_base = OTHER; note = guanosine-3'-phosphate
  modified_base 8: mod_base = OTHER; note = cytidine-3'-phosphate
  modified_base 9: mod_base = OTHER; note = cytidine-3'-phosphate
  modified_base 10: mod_base = OTHER; note = guanosine-3'-phosphate
  modified_base 11: mod_base = OTHER; note = uridine-3'-phosphate
  modified_base 12: mod_base = OTHER; note = cytidine-3'-phosphate
  modified_base 13: mod_base = OTHER; note = cytidine-3'-phosphate
  modified_base 14: mod_base = OTHER; note = cytidine-3'-phosphate
  modified_base 15: mod_base = OTHER; note = cytidine-3'-phosphate
  modified_base 16: mod_base = OTHER; note = uridine-3'-phosphate
  modified_base 17: mod_base = OTHER; note = adenosine-3'-phosphate
  modified_base 18: mod_base = OTHER; note = cytidine-3'-phosphate
  modified_base 19: mod_base = OTHER; note = adenosine-3'-phosphate
  misc_feature 1..19: note = RNA
  misc_feature 20..21: note = DNA
tcggctgccgtcccctacatt

SEQ ID NO: 810 - DNA, 21 bp, synthetic construct
  source 1..21: mol_type = other DNA
  modified_base 1: mod_base = OTHER; note = adenosine-3'-phosphate
  modified_base 2: mod_base = OTHER; note = guanosine-3'-phosphate
  modified_base 3: mod_base = OTHER; note = uridine-3'-phosphate
  modified_base 4: mod_base = OTHER; note = guanosine-3'-phosphate
  modified_base 5: mod_base = OTHER; note = guanosine-3'-phosphate
  modified_base 6: mod_base = OTHER; note = adenosine-3'-phosphate
  modified_base 7: mod_base = OTHER; note = cytidine-3'-phosphate
  modified_base 8: mod_base = OTHER; note = cytidine-3'-phosphate
  modified_base 9: mod_base = OTHER; note = cytidine-3'-phosphate
  modified_base 10: mod_base = OTHER; note = cytidine-3'-phosphate
  modified_base 11: mod_base = OTHER; note = guanosine-3'-phosphate
  modified_base 12: mod_base = OTHER; note = adenosine-3'-phosphate
  modified_base 13: mod_base = OTHER; note = guanosine-3'-phosphate
  modified_base 14: mod_base = OTHER; note = guanosine-3'-phosphate
  modified_base 15: mod_base = OTHER; note = guanosine-3'-phosphate
  modified_base 16: mod_base = OTHER; note = cytidine-3'-phosphate
  modified_base 17: mod_base = OTHER; note = cytidine-3'-phosphate
  modified_base 18: mod_base = OTHER; note = uridine-3'-phosphate
  modified_base 19: mod_base = OTHER; note = adenosine-3'-phosphate
  misc_feature 1..19: note = RNA
  misc_feature 20..21: note = DNA
agtggaccccgagggcctatt

SEQ ID NO: 811 - DNA, 21 bp, synthetic construct
  source 1..21: mol_type = other DNA
  modified_base 1: mod_base = OTHER; note = adenosine-3'-phosphate
  modified_base 2: mod_base = OTHER; note = guanosine-3'-phosphate
  modified_base 3: mod_base = OTHER; note = guanosine-3'-phosphate
  modified_base 4: mod_base = OTHER; note = guanosine-3'-phosphate
  modified_base 5: mod_base = OTHER; note = cytidine-3'-phosphate
  modified_base 6: mod_base = OTHER; note = cytidine-3'-phosphate
  modified_base 7: mod_base = OTHER; note = uridine-3'-phosphate
  modified_base 8: mod_base = OTHER; note = adenosine-3'-phosphate
  modified_base 9: mod_base = OTHER; note = guanosine-3'-phosphate
  modified_base 10: mod_base = OTHER; note = uridine-3'-phosphate
  modified_base 11: mod_base = OTHER; note = guanosine-3'-phosphate
  modified_base 12: mod_base = OTHER; note = adenosine-3'-phosphate
  modified_base 13: mod_base = OTHER; note = uridine-3'-phosphate
  modified_base 14: mod_base = OTHER; note = cytidine-3'-phosphate
  modified_base 15: mod_base = OTHER; note = cytidine-3'-phosphate
  modified_base 16: mod_base = OTHER; note = uridine-3'-phosphate
  modified_base 17: mod_base = OTHER; note = guanosine-3'-phosphate
  modified_base 18: mod_base = OTHER; note = guanosine-3'-phosphate
  modified_base 19: mod_base = OTHER; note = adenosine-3'-phosphate
  misc_feature 1..19: note = RNA
  misc_feature 20..21: note = DNA
agggcctagtgatcctggatt

SEQ ID NO: 812 - DNA, 21 bp, synthetic construct
  source 1..21: mol_type = other DNA
  modified_base 1: mod_base = OTHER; note = uridine-3'-phosphate
  modified_base 2: mod_base = OTHER; note = adenosine-3'-phosphate
  modified_base 3: mod_base = OTHER; note = guanosine-3'-phosphate
  modified_base 4: mod_base = OTHER; note = uridine-3'-phosphate
  modified_base 5: mod_base = OTHER; note = guanosine-3'-phosphate
  modified_base 6: mod_base = OTHER; note = adenosine-3'-phosphate
  modified_base 7: mod_base = OTHER; note = uridine-3'-phosphate
  modified_base 8: mod_base = OTHER; note = cytidine-3'-phosphate
  modified_base 9: mod_base = OTHER; note = cytidine-3'-phosphate
  modified_base 10: mod_base = OTHER; note = uridine-3'-phosphate
  modified_base 11: mod_base = OTHER; note = guanosine-3'-phosphate
  modified_base 12: mod_base = OTHER; note = guanosine-3'-phosphate
  modified_base 13: mod_base = OTHER; note = adenosine-3'-phosphate
  modified_base 14: mod_base = OTHER; note = adenosine-3'-phosphate
  modified_base 15: mod_base = OTHER; note = guanosine-3'-phosphate
  modified_base 16: mod_base = OTHER; note = cytidine-3'-phosphate
  modified_base 17: mod_base = OTHER; note = cytidine-3'-phosphate
  modified_base 18: mod_base = OTHER; note = adenosine-3'-phosphate
  modified_base 19: mod_base = OTHER; note = guanosine-3'-phosphate
  misc_feature 1..19: note = RNA
  misc_feature 20..21: note = DNA
tagtgatcctggaagccagtt

SEQ ID NO: 813 - DNA, 21 bp, synthetic construct
  source 1..21: mol_type = other DNA
  modified_base 1: mod_base = OTHER; note = adenosine-3'-phosphate
  modified_base 2: mod_base = OTHER; note = adenosine-3'-phosphate
  modified_base 3: mod_base = OTHER; note = guanosine-3'-phosphate
  modified_base 4: mod_base = OTHER; note = cytidine-3'-phosphate
  modified_base 5: mod_base = OTHER; note = cytidine-3'-phosphate
  modified_base 6: mod_base = OTHER; note = adenosine-3'-phosphate
  modified_base 7: mod_base = OTHER; note = guanosine-3'-phosphate
  modified_base 8: mod_base = OTHER; note = uridine-3'-phosphate
  modified_base 9: mod_base = OTHER; note = guanosine-3'-phosphate
  modified_base 10: mod_base = OTHER; note = uridine-3'-phosphate
  modified_base 11: mod_base = OTHER; note = guanosine-3'-phosphate
  modified_base 12: mod_base = OTHER; note = adenosine-3'-phosphate
  modified_base 13: mod_base = OTHER; note = adenosine-3'-phosphate
  modified_base 14: mod_base = OTHER; note = adenosine-3'-phosphate
  modified_base 15: mod_base = OTHER; note = guanosine-3'-phosphate
  modified_base 16: mod_base = OTHER; note = adenosine-3'-phosphate
  modified_base 17: mod_base = OTHER; note = cytidine-3'-phosphate
  modified_base 18: mod_base = OTHER; note = adenosine-3'-phosphate
  modified_base 19: mod_base = OTHER; note = uridine-3'-phosphate
  misc_feature 1..19: note = RNA
  misc_feature 20..21: note = DNA
aagccagtgtgaaagacattt

SEQ ID NO: 814 - DNA, 21 bp, synthetic construct
  source 1..21: mol_type = other DNA
  modified_base 1: mod_base = OTHER; note = uridine-3'-phosphate
  modified_base 2: mod_base = OTHER; note = guanosine-3'-phosphate
  modified_base 3: mod_base = OTHER; note = adenosine-3'-phosphate
  modified_base 4: mod_base = OTHER; note = adenosine-3'-phosphate
  modified_base 5: mod_base = OTHER; note = adenosine-3'-phosphate
  modified_base 6: mod_base = OTHER; note = guanosine-3'-phosphate
  modified_base 7: mod_base = OTHER; note = adenosine-3'-phosphate
  modified_base 8: mod_base = OTHER; note = cytidine-3'-phosphate
  modified_base 9: mod_base = OTHER; note = adenosine-3'-phosphate
  modified_base 10: mod_base = OTHER; note = uridine-3'-phosphate
  modified_base 11: mod_base = OTHER; note = adenosine-3'-phosphate
  modified_base 12: mod_base = OTHER; note = guanosine-3'-phosphate
  modified_base 13: mod_base = OTHER; note = cytidine-3'-phosphate
  modified_base 14: mod_base = OTHER; note = uridine-3'-phosphate
  modified_base 15: mod_base = OTHER; note = guanosine-3'-phosphate
  modified_base 16: mod_base = OTHER; note = cytidine-3'-phosphate
  modified_base 17: mod_base = OTHER; note = adenosine-3'-phosphate
  modified_base 18: mod_base = OTHER; note = uridine-3'-phosphate
  modified_base 19: mod_base = OTHER; note = uridine-3'-phosphate
  misc_feature 1..19: note = RNA
  misc_feature 20..21: note = DNA
tgaaagacatagctgcatttt

SEQ ID NO: 815 - DNA, 21 bp, synthetic construct
  source 1..21: mol_type = other DNA
  modified_base 1: mod_base = OTHER; note = uridine-3'-phosphate
  modified_base 2: mod_base = OTHER; note = guanosine-3'-phosphate
  modified_base 3: mod_base = OTHER; note = cytidine-3'-phosphate
  modified_base 4: mod_base = OTHER; note = adenosine-3'-phosphate
  modified_base 5: mod_base = OTHER; note = uridine-3'-phosphate
  modified_base 6: mod_base = OTHER; note = uridine-3'-phosphate
  modified_base 7: mod_base = OTHER; note = guanosine-3'-phosphate
  modified_base 8: mod_base = OTHER; note = adenosine-3'-phosphate
  modified_base 9: mod_base = OTHER; note = adenosine-3'-phosphate
  modified_base 10: mod_base = OTHER; note = uridine-3'-phosphate
  modified_base 11: mod_base = OTHER; note = uridine-3'-phosphate
  modified_base 12: mod_base = OTHER; note = cytidine-3'-phosphate
  modified_base 13: mod_base = OTHER; note = cytidine-3'-phosphate
  modified_base 14: mod_base = OTHER; note = adenosine-3'-phosphate
  modified_base 15: mod_base = OTHER; note = cytidine-3'-phosphate
  modified_base 16: mod_base = OTHER; note = guanosine-3'-phosphate
  modified_base 17: mod_base = OTHER; note = cytidine-3'-phosphate
  modified_base 18: mod_base = OTHER; note = uridine-3'-phosphate
  modified_base 19: mod_base = OTHER; note = guanosine-3'-phosphate
  misc_feature 1..19: note = RNA
  misc_feature 20..21: note = DNA
tgcattgaattccacgctgtt

SEQ ID NO: 816 - DNA, 21 bp, synthetic construct
  source 1..21: mol_type = other DNA
  modified_base 1: mod_base = OTHER; note = cytidine-3'-phosphate
  modified_base 2: mod_base = OTHER; note = uridine-3'-phosphate
  modified_base 3: mod_base = OTHER; note = adenosine-3'-phosphate
  modified_base 4: mod_base = OTHER; note = cytidine-3'-phosphate
  modified_base 5: mod_base = OTHER; note = adenosine-3'-phosphate
  modified_base 6: mod_base = OTHER; note = guanosine-3'-phosphate
  modified_base 7: mod_base = OTHER; note = cytidine-3'-phosphate
  modified_base 8: mod_base = OTHER; note = uridine-3'-phosphate
  modified_base 9: mod_base = OTHER; note = adenosine-3'-phosphate
  modified_base 10: mod_base = OTHER; note = cytidine-3'-phosphate
  modified_base 11: mod_base = OTHER; note = guanosine-3'-phosphate
  modified_base 12: mod_base = OTHER; note = uridine-3'-phosphate
  modified_base 13: mod_base = OTHER; note = guanosine-3'-phosphate
  modified_base 14: mod_base = OTHER; note = guanosine-3'-phosphate
  modified_base 15: mod_base = OTHER; note = guanosine-3'-phosphate
  modified_base 16: mod_base = OTHER; note = cytidine-3'-phosphate
  modified_base 17: mod_base = OTHER; note = cytidine-3'-phosphate
  modified_base 18: mod_base = OTHER; note = adenosine-3'-phosphate
  modified_base 19: mod_base = OTHER; note = guanosine-3'-phosphate
  misc_feature 1..19: note = RNA
  misc_feature 20..21: note = DNA
ctacagctacgtgggccagtt

SEQ ID NO: 817 - DNA, 21 bp, synthetic construct
  source 1..21: mol_type = other DNA
  modified_base 1: mod_base = OTHER; note = cytidine-3'-phosphate
  modified_base 2: mod_base = OTHER; note = uridine-3'-phosphate
  modified_base 3: mod_base = OTHER; note = adenosine-3'-phosphate
  modified_base 4: mod_base = OTHER; note = cytidine-3'-phosphate
  modified_base 5: mod_base = OTHER; note = guanosine-3'-phosphate
  modified_base 6: mod_base = OTHER; note = uridine-3'-phosphate
  modified_base 7: mod_base = OTHER; note = guanosine-3'-phosphate
  modified_base 8: mod_base = OTHER; note = guanosine-3'-phosphate
  modified_base 9: mod_base = OTHER; note = guanosine-3'-phosphate
  modified_base 10: mod_base = OTHER; note = cytidine-3'-phosphate
  modified_base 11: mod_base = OTHER; note = cytidine-3'-phosphate
  modified_base 12: mod_base = OTHER; note = adenosine-3'-phosphate
  modified_base 13: mod_base = OTHER; note = guanosine-3'-phosphate
  modified_base 14: mod_base = OTHER; note = guanosine-3'-phosphate
  modified_base 15: mod_base = OTHER; note = guanosine-3'-phosphate
  modified_base 16: mod_base = OTHER; note = cytidine-3'-phosphate
  modified_base 17: mod_base = OTHER; note = cytidine-3'-phosphate
  modified_base 18: mod_base = OTHER; note = adenosine-3'-phosphate
  modified_base 19: mod_base = OTHER; note = guanosine-3'-phosphate
  misc_feature 1..19: note = RNA
  misc_feature 20..21: note = DNA
ctacgtgggccagggccagtt

SEQ ID NO: 818 - DNA, 21 bp, synthetic construct
  source 1..21: mol_type = other DNA
  modified_base 1: mod_base = OTHER; note = adenosine-3'-phosphate
  modified_base 2: mod_base = OTHER; note = guanosine-3'-phosphate
  modified_base 3: mod_base = OTHER; note = guanosine-3'-phosphate
  modified_base 4: mod_base = OTHER; note = guanosine-3'-phosphate
  modified_base 5: mod_base = OTHER; note = cytidine-3'-phosphate
  modified_base 6: mod_base = OTHER; note = cytidine-3'-phosphate
  modified_base 7: mod_base = OTHER; note = adenosine-3'-phosphate
  modified_base 8: mod_base = OTHER; note = guanosine-3'-phosphate
  modified_base 9: mod_base = OTHER; note = guanosine-3'-phosphate
  modified_base 10: mod_base = OTHER; note = uridine-3'-phosphate
  modified_base 11: mod_base = OTHER; note = cytidine-3'-phosphate
  modified_base 12: mod_base = OTHER; note = cytidine-3'-phosphate
  modified_base 13: mod_base = OTHER; note = uridine-3'-phosphate
  modified_base 14: mod_base = OTHER; note = cytidine-3'-phosphate
  modified_base 15: mod_base = OTHER; note = cytidine-3'-phosphate
  modified_base 16: mod_base = OTHER; note = guanosine-3'-phosphate
  modified_base 17: mod_base = OTHER; note = guanosine-3'-phosphate
  modified_base 18: mod_base = OTHER; note = cytidine-3'-phosphate
  modified_base 19: mod_base = OTHER; note = uridine-3'-phosphate
  misc_feature 1..19: note = RNA
  misc_feature 20..21: note = DNA
agggccaggtcctccggcttt

SEQ ID NO: 819 - DNA, 21 bp, synthetic construct
  source 1..21: mol_type = other DNA
  modified_base 1: mod_base = OTHER; note = cytidine-3'-phosphate
  modified_base 2: mod_base = OTHER; note = cytidine-3'-phosphate
  modified_base 3: mod_base = OTHER; note = guanosine-3'-phosphate
  modified_base 4: mod_base = OTHER; note = guanosine-3'-phosphate
  modified_base 5: mod_base = OTHER; note = cytidine-3'-phosphate
  modified_base 6: mod_base = OTHER; note = uridine-3'-phosphate
  modified_base 7: mod_base = OTHER; note = guanosine-3'-phosphate
  modified_base 8: mod_base = OTHER; note = adenosine-3'-phosphate
  modified_base 9: mod_base = OTHER; note = adenosine-3'-phosphate
  modified_base 10: mod_base = OTHER; note = guanosine-3'-phosphate
  modified_base 11: mod_base = OTHER; note = guanosine-3'-phosphate
  modified_base 12: mod_base = OTHER; note = guanosine-3'-phosphate
  modified_base 13: mod_base = OTHER; note = guanosine-3'-phosphate
  modified_base 14: mod_base = OTHER; note = cytidine-3'-phosphate
  modified_base 15: mod_base = OTHER; note = cytidine-3'-phosphate
  modified_base 16: mod_base = OTHER; note = uridine-3'-phosphate
  modified_base 17: mod_base = OTHER; note = guanosine-3'-phosphate
  modified_base 18: mod_base = OTHER; note = adenosine-3'-phosphate
  modified_base 19: mod_base = OTHER; note = cytidine-3'-phosphate
  misc_feature 1..19: note = RNA
  misc_feature 20..21: note = DNA
ccggctgaaggggcctgactt

SEQ ID NO: 820 - DNA, 21 bp, synthetic construct
  source 1..21: mol_type = other DNA
  modified_base 1: mod_base = OTHER; note = guanosine-3'-phosphate
  modified_base 2: mod_base = OTHER; note = guanosine-3'-phosphate
  modified_base 3: mod_base = OTHER; note = guanosine-3'-phosphate
  modified_base 4: mod_base = OTHER; note = cytidine-3'-phosphate
  modified_base 5: mod_base = OTHER; note = cytidine-3'-phosphate
  modified_base 6: mod_base = OTHER; note = uridine-3'-phosphate
  modified_base 7: mod_base = OTHER; note = guanosine-3'-phosphate
  modified_base 8: mod_base = OTHER; note = adenosine-3'-phosphate
  modified_base 9: mod_base = OTHER; note = cytidine-3'-phosphate
  modified_base 10: mod_base = OTHER; note = cytidine-3'-phosphate
  modified_base 11: mod_base = OTHER; note = adenosine-3'-phosphate
  modified_base 12: mod_base = OTHER; note = cytidine-3'-phosphate
  modified_base 13: mod_base = OTHER; note = cytidine-3'-phosphate
  modified_base 14: mod_base = OTHER; note = uridine-3'-phosphate
  modified_base 15: mod_base = OTHER; note = guanosine-3'-phosphate
  modified_base 16: mod_base = OTHER; note = guanosine-3'-phosphate
  modified_base 17: mod_base = OTHER; note = cytidine-3'-phosphate
  modified_base 18: mod_base = OTHER; note = cytidine-3'-phosphate
  modified_base 19: mod_base = OTHER; note = uridine-3'-phosphate
  misc_feature 1..19: note = RNA
  misc_feature 20..21: note = DNA
gggcctgaccacctggccttt

SEQ ID NO: 821 - DNA, 21 bp, synthetic construct
  source 1..21: mol_type = other DNA
  modified_base 1: mod_base = OTHER; note = cytidine-3'-phosphate
  modified_base 2: mod_base = OTHER; note = cytidine-3'-phosphate
  modified_base 3: mod_base = OTHER; note = adenosine-3'-phosphate
  modified_base 4: mod_base = OTHER; note = cytidine-3'-phosphate
  modified_base 5: mod_base = OTHER; note = cytidine-3'-phosphate
  modified_base 6: mod_base = OTHER; note = uridine-3'-phosphate
  modified_base 7: mod_base = OTHER; note = guanosine-3'-phosphate
  modified_base 8: mod_base = OTHER; note = guanosine-3'-phosphate
  modified_base 9: mod_base = OTHER; note = cytidine-3'-phosphate
  modified_base 10: mod_base = OTHER; note = cytidine-3'-phosphate
  modified_base 11: mod_base = OTHER; note = uridine-3'-phosphate
  modified_base 12: mod_base = OTHER; note = cytidine-3'-phosphate
  modified_base 13: mod_base = OTHER; note = cytidine-3'-phosphate
  modified_base 14: mod_base = OTHER; note = adenosine-3'-phosphate
  modified_base 15: mod_base = OTHER; note = guanosine-3'-phosphate
  modified_base 16: mod_base = OTHER; note = cytidine-3'-phosphate
  modified_base 17: mod_base = OTHER; note = uridine-3'-phosphate
  modified_base 18: mod_base = OTHER; note = guanosine-3'-phosphate
  modified_base 19: mod_base = OTHER; note = cytidine-3'-phosphate
  misc_feature 1..19: note = RNA
  misc_feature 20..21: note = DNA
ccacctggcctccagctgctt

SEQ ID NO: 822 - DNA, 21 bp, synthetic construct
  source 1..21: mol_type = other DNA
  modified_base 1: mod_base = OTHER; note = cytidine-3'-phosphate
  modified_base 2: mod_base = OTHER; note = cytidine-3'-phosphate
  modified_base 3: mod_base = OTHER; note = adenosine-3'-phosphate
  modified_base 4: mod_base = OTHER; note = guanosine-3'-phosphate
  modified_base 5: mod_base = OTHER; note = cytidine-3'-phosphate
  modified_base 6: mod_base = OTHER; note = uridine-3'-phosphate
  modified_base 7: mod_base = OTHER; note = guanosine-3'-phosphate
  modified_base 8: mod_base = OTHER; note = cytidine-3'-phosphate
  modified_base 9: mod_base = OTHER; note = cytidine-3'-phosphate
  modified_base 10: mod_base = OTHER; note = uridine-3'-phosphate
  modified_base 11: mod_base = OTHER; note = guanosine-3'-phosphate
  modified_base 12: mod_base = OTHER; note = uridine-3'-phosphate
  modified_base 13: mod_base = OTHER; note = guanosine-3'-phosphate
  modified_base 14: mod_base = OTHER; note = guanosine-3'-phosphate
  modified_base 15: mod_base = OTHER; note = cytidine-3'-phosphate
  modified_base 16: mod_base = OTHER; note = adenosine-3'-phosphate
  modified_base 17: mod_base = OTHER; note = cytidine-3'-phosphate
  modified_base 18: mod_base = OTHER; note = cytidine-3'-phosphate
  modified_base 19: mod_base = OTHER; note = uridine-3'-phosphate
  misc_feature 1..19: note = RNA
  misc_feature 20..21: note = DNA
ccagctgcctgtggcaccttt

SEQ ID NO: 823 - DNA, 21 bp, synthetic construct
  source 1..21: mol_type = other DNA
  modified_base 1: mod_base = OTHER; note = cytidine-3'-phosphate
  modified_base 2: mod_base = OTHER; note = uridine-3'-phosphate
  modified_base 3: mod_base = OTHER; note = guanosine-3'-phosphate
  modified_base 4: mod_base = OTHER; note = uridine-3'-phosphate
  modified_base 5: mod_base = OTHER; note = guanosine-3'-phosphate
  modified_base 6: mod_base = OTHER; note = guanosine-3'-phosphate
  modified_base 7: mod_base = OTHER; note = cytidine-3'-phosphate
  modified_base 8: mod_base = OTHER; note = adenosine-3'-phosphate
  modified_base 9: mod_base = OTHER; note = cytidine-3'-phosphate
  modified_base 10: mod_base = OTHER; note = cytidine-3'-phosphate
  modified_base 11: mod_base = OTHER; note = uridine-3'-phosphate
  modified_base 12: mod_base = OTHER; note = guanosine-3'-phosphate
  modified_base 13: mod_base = OTHER; note = cytidine-3'-phosphate
  modified_base 14: mod_base = OTHER; note = adenosine-3'-phosphate
  modified_base 15: mod_base = OTHER; note = guanosine-3'-phosphate
  modified_base 16: mod_base = OTHER; note = guanosine-3'-phosphate
  modified_base 17: mod_base = OTHER; note = guanosine-3'-phosphate
  modified_base 18: mod_base = OTHER; note = cytidine-3'-phosphate
  modified_base 19: mod_base = OTHER; note = cytidine-3'-phosphate
  misc_feature 1..19: note = RNA
  misc_feature 20..21: note = DNA
ctgtggcacctgcagggcctt

SEQ ID NO: 824 - DNA, 21 bp, synthetic construct
  source 1..21: mol_type = other DNA
  modified_base 1: mod_base = OTHER; note = cytidine-3'-phosphate
  modified_base 2: mod_base = OTHER; note = uridine-3'-phosphate
  modified_base 3: mod_base = OTHER; note = guanosine-3'-phosphate
  modified_base 4: mod_base = OTHER; note = cytidine-3'-phosphate
  modified_base 5: mod_base = OTHER; note = adenosine-3'-phosphate
  modified_base 6: mod_base = OTHER; note = guanosine-3'-phosphate
  modified_base 7: mod_base = OTHER; note = guanosine-3'-phosphate
  modified_base 8: mod_base = OTHER; note = guanosine-3'-phosphate
  modified_base 9: mod_base = OTHER; note = cytidine-3'-phosphate
  modified_base 10: mod_base = OTHER; note = cytidine-3'-phosphate
  modified_base 11: mod_base = OTHER; note = cytidine-3'-phosphate
  modified_base 12: mod_base = OTHER; note = cytidine-3'-phosphate
  modified_base 13: mod_base = OTHER; note = adenosine-3'-phosphate
  modified_base 14: mod_base = OTHER; note = adenosine-3'-phosphate
  modified_base 15: mod_base = OTHER; note = guanosine-3'-phosphate
  modified_base 16: mod_base = OTHER; note = guanosine-3'-phosphate
  modified_base 17: mod_base = OTHER; note = adenosine-3'-phosphate
  modified_base 18: mod_base = OTHER; note = cytidine-3'-phosphate
  modified_base 19: mod_base = OTHER; note = cytidine-3'-phosphate
  misc_feature 1..19: note = RNA
  misc_feature 20..21: note = DNA
ctgcagggccccaaggacctt

SEQ ID NO: 825 - DNA, 21 bp, synthetic construct
  source 1..21: mol_type = other DNA
  modified_base 1: mod_base = OTHER; note = cytidine-3'-phosphate
  modified_base 2: mod_base = OTHER; note = cytidine-3'-phosphate
  modified_base 3: mod_base = OTHER; note = adenosine-3'-phosphate
  modified_base 4: mod_base = OTHER; note = adenosine-3'-phosphate
  modified_base 5: mod_base = OTHER; note = guanosine-3'-phosphate
  modified_base 6: mod_base = OTHER; note = guanosine-3'-phosphate
  modified_base 7: mod_base = OTHER; note = adenosine-3'-phosphate
  modified_base 8: mod_base = OTHER; note = cytidine-3'-phosphate
  modified_base 9: mod_base = OTHER; note = cytidine-3'-phosphate
  modified_base 10: mod_base = OTHER; note = uridine-3'-phosphate
  modified_base 11: mod_base = OTHER; note = cytidine-3'-phosphate
  modified_base 12: mod_base = OTHER; note = adenosine-3'-phosphate
  modified_base 13: mod_base = OTHER; note = uridine-3'-phosphate
  modified_base 14: mod_base = OTHER; note = guanosine-3'-phosphate
  modified_base 15: mod_base = OTHER; note = cytidine-3'-phosphate
  modified_base 16: mod_base = OTHER; note = uridine-3'-phosphate
  modified_base 17: mod_base = OTHER; note = cytidine-3'-phosphate
  modified_base 18: mod_base = OTHER; note = adenosine-3'-phosphate
  modified_base 19: mod_base = OTHER; note = adenosine-3'-phosphate
  misc_feature 1..19: note = RNA
  misc_feature 20..21: note = DNA
ccaaggacctcatgctcaatt

SEQ ID NO: 826 - DNA, 21 bp, synthetic construct
  source 1..21: mol_type = other DNA
  modified_base 1: mod_base = OTHER; note = uridine-3'-phosphate
  modified_base 2: mod_base = OTHER; note = guanosine-3'-phosphate
  modified_base 3: mod_base = OTHER; note = cytidine-3'-phosphate
  modified_base 4: mod_base = OTHER; note = uridine-3'-phosphate
  modified_base 5: mod_base = OTHER; note = cytidine-3'-phosphate
  modified_base 6: mod_base = OTHER; note = adenosine-3'-phosphate
  modified_base 7: mod_base = OTHER; note = adenosine-3'-phosphate
  modified_base 8: mod_base = OTHER; note = adenosine-3'-phosphate
  modified_base 9: mod_base = OTHER; note = cytidine-3'-phosphate
  modified_base 10: mod_base = OTHER; note = uridine-3'-phosphate
  modified_base 11: mod_base = OTHER; note = cytidine-3'-phosphate
  modified_base 12: mod_base = OTHER; note = cytidine-3'-phosphate
  modified_base 13: mod_base = OTHER; note = guanosine-3'-phosphate
  modified_base 14: mod_base = OTHER; note = guanosine-3'-phosphate
  modified_base 15: mod_base = OTHER; note = cytidine-3'-phosphate
  modified_base 16: mod_base = OTHER; note = uridine-3'-phosphate
  modified_base 17: mod_base = OTHER; note = guanosine-3'-phosphate
  modified_base 18: mod_base = OTHER; note = guanosine-3'-phosphate
  modified_base 19: mod_base = OTHER; note = adenosine-3'-phosphate
  misc_feature 1..19: note = RNA
  misc_feature 20..21: note = DNA
tgctcaaactccggctggatt

SEQ ID NO: 827 - DNA, 21 bp, synthetic construct
  source 1..21: mol_type = other DNA
  modified_base 1: mod_base = OTHER; note = cytidine-3'-phosphate
  modified_base 2: mod_base = OTHER; note = cytidine-3'-phosphate
  modified_base 3: mod_base = OTHER; note = guanosine-3'-phosphate
  modified_base 4: mod_base = OTHER; note = guanosine-3'-phosphate
  modified_base 5: mod_base = OTHER; note = cytidine-3'-phosphate
  modified_base 6: mod_base = OTHER; note = uridine-3'-phosphate
  modified_base 7: mod_base = OTHER; note = guanosine-3'-phosphate
  modified_base 8: mod_base = OTHER; note = guanosine-3'-phosphate
  modified_base 9: mod_base = OTHER; note = adenosine-3'-phosphate
  modified_base 10: mod_base = OTHER; note = guanosine-3'-phosphate
  modified_base 11: mod_base = OTHER; note = uridine-3'-phosphate
  modified_base 12: mod_base = OTHER; note = guanosine-3'-phosphate
  modified_base 13: mod_base = OTHER; note = guanosine-3'-phosphate
  modified_base 14: mod_base = OTHER; note = adenosine-3'-phosphate
  modified_base 15: mod_base = OTHER; note = cytidine-3'-phosphate
  modified_base 16: mod_base = OTHER; note = guanosine-3'-phosphate
  modified_base 17: mod_base = OTHER; note = cytidine-3'-phosphate
  modified_base 18: mod_base = OTHER; note = uridine-3'-phosphate
  modified_base 19: mod_base = OTHER; note = guanosine-3'-phosphate
  misc_feature 1..19: note = RNA
  misc_feature 20..21: note = DNA
ccggctggagtggacgctgtt

SEQ ID NO: 828 - DNA, 21 bp, synthetic construct
  source 1..21: mol_type = other DNA
  modified_base 1: mod_base = OTHER; note = guanosine-3'-phosphate
  modified_base 2: mod_base = OTHER; note = adenosine-3'-phosphate
  modified_base 3: mod_base = OTHER; note = cytidine-3'-phosphate
  modified_base 4: mod_base = OTHER; note = guanosine-3'-phosphate
  modified_base 5: mod_base = OTHER; note = cytidine-3'-phosphate
  modified_base 6: mod_base = OTHER; note = uridine-3'-phosphate
  modified_base 7: mod_base = OTHER; note = guanosine-3'-phosphate
  modified_base 8: mod_base = OTHER; note = guanosine-3'-phosphate
  modified_base 9: mod_base = OTHER; note = cytidine-3'-phosphate
  modified_base 10: mod_base = OTHER; note = adenosine-3'-phosphate
  modified_base 11: mod_base = OTHER; note = guanosine-3'-phosphate
  modified_base 12: mod_base = OTHER; note = adenosine-3'-phosphate
  modified_base 13: mod_base = OTHER; note = guanosine-3'-phosphate
  modified_base 14: mod_base = OTHER; note = uridine-3'-phosphate
  modified_base 15: mod_base = OTHER; note = guanosine-3'-phosphate
  modified_base 16: mod_base = OTHER; note = cytidine-3'-phosphate
  modified_base 17: mod_base = OTHER; note = cytidine-3'-phosphate
  modified_base 18: mod_base = OTHER; note = guanosine-3'-phosphate
  modified_base 19: mod_base = OTHER; note = guanosine-3'-phosphate
  misc_feature 1..19: note = RNA
  misc_feature 20..21: note = DNA
gacgctggcagagtgccggtt

SEQ ID NO: 829 - DNA, 21 bp, synthetic construct
  source 1..21: mol_type = other DNA
  modified_base 1: mod_base = OTHER; note = guanosine-3'-phosphate
  modified_base 2: mod_base = OTHER; note = guanosine-3'-phosphate
  modified_base 3: mod_base = OTHER; note = cytidine-3'-phosphate
  modified_base 4: mod_base = OTHER; note = adenosine-3'-phosphate
  modified_base 5: mod_base = OTHER; note = guanosine-3'-phosphate
  modified_base 6: mod_base = OTHER; note = adenosine-3'-phosphate
  modified_base 7: mod_base = OTHER; note = guanosine-3'-phosphate
  modified_base 8: mod_base = OTHER; note = uridine-3'-phosphate
  modified_base 9: mod_base = OTHER; note = guanosine-3'-phosphate
  modified_base 10: mod_base = OTHER; note = cytidine-3'-phosphate
  modified_base 11: mod_base = OTHER; note = cytidine-3'-phosphate
  modified_base 12: mod_base = OTHER; note = guanosine-3'-phosphate
  modified_base 13: mod_base = OTHER; note = guanosine-3'-phosphate
  modified_base 14: mod_base = OTHER; note = guanosine-3'-phosphate
  modified_base 15: mod_base = OTHER; note = adenosine-3'-phosphate
  modified_base 16: mod_base = OTHER; note = cytidine-3'-phosphate
  modified_base 17: mod_base = OTHER; note = cytidine-3'-phosphate
  modified_base 18: mod_base = OTHER; note = guanosine-3'-phosphate
  modified_base 19: mod_base = OTHER; note = adenosine-3'-phosphate
  misc_feature 1..19: note = RNA
  misc_feature 20..21: note = DNA
ggcagagtgccgggaccgatt

SEQ ID NO: 830 - DNA, 21 bp, synthetic construct
  source 1..21: mol_type = other DNA
  modified_base 1: mod_base = OTHER; note = adenosine-3'-phosphate
  modified_base 2: mod_base = OTHER; note = cytidine-3'-phosphate
  modified_base 3: mod_base = OTHER; note = cytidine-3'-phosphate
  modified_base 4: mod_base = OTHER; note = guanosine-3'-phosphate
  modified_base 5: mod_base = OTHER; note = adenosine-3'-phosphate
  modified_base 6: mod_base = OTHER; note = cytidine-3'-phosphate
  modified_base 7: mod_base = OTHER; note = uridine-3'-phosphate
  modified_base 8: mod_base = OTHER; note = guanosine-3'-phosphate
  modified_base 9: mod_base = OTHER; note = guanosine-3'-phosphate
  modified_base 10: mod_base = OTHER; note = cytidine-3'-phosphate
  modified_base 11: mod_base = OTHER; note = cytidine-3'-phosphate
  modified_base 12: mod_base = OTHER; note = adenosine-3'-phosphate
  modified_base 13: mod_base = OTHER; note = uridine-3'-phosphate
  modified_base 14: mod_base = OTHER; note = guanosine-3'-phosphate
  modified_base 15: mod_base = OTHER; note = uridine-3'-phosphate
  modified_base 16: mod_base = OTHER; note = adenosine-3'-phosphate
  modified_base 17: mod_base = OTHER; note = uridine-3'-phosphate
  modified_base 18: mod_base = OTHER; note = guanosine-3'-phosphate
  modified_base 19: mod_base = OTHER; note = adenosine-3'-phosphate
  misc_feature 1..19: note = RNA
  misc_feature 20..21: note = DNA
accgactggccatgtatgatt

SEQ ID NO: 831 - DNA, 21 bp, synthetic construct
  source 1..21: mol_type = other DNA
  modified_base 1: mod_base = OTHER; note = cytidine-3'-phosphate
  modified_base 2: mod_base = OTHER; note = cytidine-3'-phosphate
  modified_base 3: mod_base = OTHER; note = adenosine-3'-phosphate
  modified_base 4: mod_base = OTHER; note = uridine-3'-phosphate
  modified_base 5: mod_base = OTHER; note = guanosine-3'-phosphate
  modified_base 6: mod_base = OTHER; note = uridine-3'-phosphate
  modified_base 7: mod_base = OTHER; note = adenosine-3'-phosphate
  modified_base 8: mod_base = OTHER; note = uridine-3'-phosphate
  modified_base 9: mod_base = OTHER; note = guanosine-3'-phosphate
  modified_base 10: mod_base = OTHER; note = adenosine-3'-phosphate
  modified_base 11: mod_base = OTHER; note = cytidine-3'-phosphate
  modified_base 12: mod_base = OTHER; note = guanosine-3'-phosphate
  modified_base 13: mod_base = OTHER; note = uridine-3'-phosphate
  modified_base 14: mod_base = OTHER; note = guanosine-3'-phosphate
  modified_base 15: mod_base = OTHER; note = guanosine-3'-phosphate
  modified_base 16: mod_base = OTHER; note = cytidine-3'-phosphate
  modified_base 17: mod_base = OTHER; note = cytidine-3'-phosphate
  modified_base 18: mod_base = OTHER; note = guanosine-3'-phosphate
  modified_base 19: mod_base = OTHER; note = guanosine-3'-phosphate
  misc_feature 1..19: note = RNA
  misc_feature 20..21: note = DNA
ccatgtatgacgtggccggtt

SEQ ID NO: 832 - DNA, 21 bp, synthetic construct
  source 1..21: mol_type = other DNA
  modified_base 1: mod_base = OTHER; note = guanosine-3'-phosphate
  modified_base 2: mod_base = OTHER; note = uridine-3'-phosphate
  modified_base 3: mod_base = OTHER; note = guanosine-3'-phosphate
  modified_base 4: mod_base = OTHER; note = guanosine-3'-phosphate
  modified_base 5: mod_base = OTHER; note = cytidine-3'-phosphate
  modified_base 6: mod_base = OTHER; note = cytidine-3'-phosphate
  modified_base 7: mod_base = OTHER; note = guanosine-3'-phosphate
  modified_base 8: mod_base = OTHER; note = guanosine-3'-phosphate
  modified_base 9: mod_base = OTHER; note = guanosine-3'-phosphate
  modified_base 10: mod_base = OTHER; note = cytidine-3'-phosphate
  modified_base 11: mod_base = OTHER; note = cytidine-3'-phosphate
  modified_base 12: mod_base = OTHER; note = cytidine-3'-phosphate
  modified_base 13: mod_base = OTHER; note = cytidine-3'-phosphate
  modified_base 14: mod_base = OTHER; note = uridine-3'-phosphate
  modified_base 15: mod_base = OTHER; note = guanosine-3'-phosphate
  modified_base 16: mod_base = OTHER; note = guanosine-3'-phosphate
  modified_base 17: mod_base = OTHER; note = adenosine-3'-phosphate
  modified_base 18: mod_base = OTHER; note = guanosine-3'-phosphate
  modified_base 19: mod_base = OTHER; note = adenosine-3'-phosphate
  misc_feature 1..19: note = RNA
  misc_feature 20..21: note = DNA
gtggccgggcccctggagatt

SEQ ID NO: 833 - DNA, 21 bp, synthetic construct
  source 1..21: mol_type = other DNA
  modified_base 1: mod_base = OTHER; note = cytidine-3'-phosphate
  modified_base 2: mod_base = OTHER; note = cytidine-3'-phosphate
  modified_base 3: mod_base = OTHER; note = cytidine-3'-phosphate
  modified_base 4: mod_base = OTHER; note = uridine-3'-phosphate
  modified_base 5: mod_base = OTHER; note = guanosine-3'-phosphate
  modified_base 6: mod_base = OTHER; note = guanosine-3'-phosphate
  modified_base 7: mod_base = OTHER; note = adenosine-3'-phosphate
  modified_base 8: mod_base = OTHER; note = guanosine-3'-phosphate
  modified_base 9: mod_base = OTHER; note = adenosine-3'-phosphate
  modified_base 10: mod_base = OTHER; note = adenosine-3'-phosphate
  modified_base 11: mod_base = OTHER; note = guanosine-3'-phosphate
  modified_base 12: mod_base = OTHER; note = adenosine-3'-phosphate
  modified_base 13: mod_base = OTHER; note = guanosine-3'-phosphate
  modified_base 14: mod_base = OTHER; note = guanosine-3'-phosphate
  modified_base 15: mod_base = OTHER; note = cytidine-3'-phosphate
  modified_base 16: mod_base = OTHER; note = uridine-3'-phosphate
  modified_base 17: mod_base = OTHER; note = cytidine-3'-phosphate
  modified_base 18: mod_base = OTHER; note = adenosine-3'-phosphate
  modified_base 19: mod_base = OTHER; note = uridine-3'-phosphate
  misc_feature 1..19: note = RNA
  misc_feature 20..21: note = DNA
ccctggagaagaggctcattt

SEQ ID NO: 834 - DNA, 21 bp, synthetic construct
  source 1..21: mol_type = other DNA
  modified_base 1: mod_base = OTHER; note = adenosine-3'-phosphate
  modified_base 2: mod_base = OTHER; note = guanosine-3'-phosphate
  modified_base 3: mod_base = OTHER; note = adenosine-3'-phosphate
  modified_base 4: mod_base = OTHER; note = adenosine-3'-phosphate
  modified_base 5: mod_base = OTHER; note = guanosine-3'-phosphate
  modified_base 6: mod_base = OTHER; note = adenosine-3'-phosphate
  modified_base 7: mod_base = OTHER; note = guanosine-3'-phosphate
  modified_base 8: mod_base = OTHER; note = guanosine-3'-phosphate
  modified_base 9: mod_base = OTHER; note = cytidine-3'-phosphate
  modified_base 10: mod_base = OTHER; note = uridine-3'-phosphate
  modified_base 11: mod_base = OTHER; note = cytidine-3'-phosphate
  modified_base 12: mod_base = OTHER; note = adenosine-3'-phosphate
  modified_base 13: mod_base = OTHER; note = uridine-3'-phosphate
  modified_base 14: mod_base = OTHER; note = cytidine-3'-phosphate
  modified_base 15: mod_base = OTHER; note = adenosine-3'-phosphate
  modified_base 16: mod_base = OTHER; note = cytidine-3'-phosphate
  modified_base 17: mod_base = OTHER; note = cytidine-3'-phosphate
  modified_base 18: mod_base = OTHER; note = uridine-3'-phosphate
  modified_base 19: mod_base = OTHER; note = cytidine-3'-phosphate
  misc_feature 1..19: note = RNA
  misc_feature 20..21: note = DNA
agaagaggctcatcacctctt

SEQ ID NO: 835 - DNA, 21 bp, synthetic construct
  source 1..21: mol_type = other DNA
  modified_base 1: mod_base = OTHER; note = adenosine-3'-phosphate
  modified_base 2: mod_base = OTHER; note = cytidine-3'-phosphate
  modified_base 3: mod_base = OTHER; note = cytidine-3'-phosphate
  modified_base 4: mod_base = OTHER; note = uridine-3'-phosphate
  modified_base 5: mod_base = OTHER; note = cytidine-3'-phosphate
  modified_base 6: mod_base = OTHER; note = guanosine-3'-phosphate
  modified_base 7: mod_base = OTHER; note = guanosine-3'-phosphate
  modified_base 8: mod_base = OTHER; note = uridine-3'-phosphate
  modified_base 9: mod_base = OTHER; note = guanosine-3'-phosphate
  modified_base 10: mod_base = OTHER; note = uridine-3'-phosphate
  modified_base 11: mod_base = OTHER; note = adenosine-3'-phosphate
  modified_base 12: mod_base = OTHER; note = cytidine-3'-phosphate
  modified_base 13: mod_base = OTHER; note = guanosine-3'-phosphate
  modified_base 14: mod_base = OTHER; note = guanosine-3'-phosphate
  modified_base 15: mod_base = OTHER; note = cytidine-3'-phosphate
  modified_base 16: mod_base = OTHER; note = uridine-3'-phosphate
  modified_base 17: mod_base = OTHER; note = guanosine-3'-phosphate
  modified_base 18: mod_base = OTHER; note = cytidine-3'-phosphate
  modified_base 19: mod_base = OTHER; note = adenosine-3'-phosphate
  misc_feature 1..19: note = RNA
  misc_feature 20..21: note = DNA
acctcggtgtacggctgcatt

SEQ ID NO: 836 - DNA, 21 bp, synthetic construct
  source 1..21: mol_type = other DNA
  modified_base 1: mod_base = OTHER; note = adenosine-3'-phosphate
  modified_base 2: mod_base = OTHER; note = cytidine-3'-phosphate
  modified_base 3: mod_base = OTHER; note = guanosine-3'-phosphate
  modified_base 4: mod_base = OTHER; note = guanosine-3'-phosphate
  modified_base 5: mod_base = OTHER; note = cytidine-3'-phosphate
  modified_base 6: mod_base = OTHER; note = uridine-3'-phosphate
  modified_base 7: mod_base = OTHER; note = guanosine-3'-phosphate
  modified_base 8: mod_base = OTHER; note = cytidine-3'-phosphate
  modified_base 9: mod_base = OTHER; note = adenosine-3'-phosphate
  modified_base 10: mod_base = OTHER; note = guanosine-3'-phosphate
  modified_base 11: mod_base = OTHER; note = cytidine-3'-phosphate
  modified_base 12: mod_base = OTHER; note = cytidine-3'-phosphate
  modified_base 13: mod_base = OTHER; note = guanosine-3'-phosphate
  modified_base 14: mod_base = OTHER; note = cytidine-3'-phosphate
  modified_base 15: mod_base = OTHER; note = cytidine-3'-phosphate
  modified_base 16: mod_base = OTHER; note = adenosine-3'-phosphate
  modified_base 17: mod_base = OTHER; note = guanosine-3'-phosphate
  modified_base 18: mod_base = OTHER; note = guanosine-3'-phosphate
  modified_base 19: mod_base = OTHER; note = adenosine-3'-phosphate
  misc_feature 1..19: note = RNA
  misc_feature 20..21: note = DNA
acggctgcagccgccaggatt

SEQ ID NO: 837 - DNA, 21 bp, synthetic construct
  source 1..21: mol_type = other DNA
  modified_base 1: mod_base = OTHER; note = guanosine-3'-phosphate
  modified_base 2: mod_base = OTHER; note = cytidine-3'-phosphate
  modified_base 3: mod_base = OTHER; note = cytidine-3'-phosphate
  modified_base 4: mod_base = OTHER; note = guanosine-3'-phosphate
  modified_base 5: mod_base = OTHER; note = cytidine-3'-phosphate
  modified_base 6: mod_base = OTHER; note = cytidine-3'-phosphate
  modified_base 7: mod_base = OTHER; note = adenosine-3'-phosphate
  modified_base 8: mod_base = OTHER; note = guanosine-3'-phosphate
  modified_base 9: mod_base = OTHER; note = guanosine-3'-phosphate
  modified_base 10: mod_base = OTHER; note = adenosine-3'-phosphate
  modified_base 11: mod_base = OTHER; note = guanosine-3'-phosphate
  modified_base 12: mod_base = OTHER; note = cytidine-3'-phosphate
  modified_base 13: mod_base = OTHER; note = cytidine-3'-phosphate
  modified_base 14: mod_base = OTHER; note = cytidine-3'-phosphate
  modified_base 15: mod_base = OTHER; note = guanosine-3'-phosphate
  modified_base 16: mod_base = OTHER; note = uridine-3'-phosphate
  modified_base 17: mod_base = OTHER; note = guanosine-3'-phosphate
  modified_base 18: mod_base = OTHER; note = guanosine-3'-phosphate
  modified_base 19: mod_base = OTHER; note = uridine-3'-phosphate
  misc_feature 1..19: note = RNA
  misc_feature 20..21: note = DNA
gccgccaggagcccgtggttt

SEQ ID NO: 838 - DNA, 21 bp, synthetic construct
  source 1..21: mol_type = other DNA
  modified_base 1: mod_base = OTHER; note = adenosine-3'-phosphate
  modified_base 2: mod_base = OTHER; note = guanosine-3'-phosphate
  modified_base 3: mod_base = OTHER; note = cytidine-3'-phosphate
  modified_base 4: mod_base = OTHER; note = cytidine-3'-phosphate
  modified_base 5: mod_base = OTHER; note = cytidine-3'-phosphate
  modified_base 6: mod_base = OTHER; note = guanosine-3'-phosphate
  modified_base 7: mod_base = OTHER; note = uridine-3'-phosphate
  modified_base 8: mod_base = OTHER; note = guanosine-3'-phosphate
  modified_base 9: mod_base = OTHER; note = guanosine-3'-phosphate
  modified_base 10: mod_base = OTHER; note = uridine-3'-phosphate
  modified_base 11: mod_base = OTHER; note = guanosine-3'-phosphate
  modified_base 12: mod_base = OTHER; note = guanosine-3'-phosphate
  modified_base 13: mod_base = OTHER; note = adenosine-3'-phosphate
  modified_base 14: mod_base = OTHER; note = guanosine-3'-phosphate
  modified_base 15: mod_base = OTHER; note = guanosine-3'-phosphate
  modified_base 16: mod_base = OTHER; note = uridine-3'-phosphate
  modified_base 17: mod_base = OTHER; note = uridine-3'-phosphate
  modified_base 18: mod_base = OTHER; note = cytidine-3'-phosphate
  modified_base 19: mod_base = OTHER; note = uridine-3'-phosphate
  misc_feature 1..19: note = RNA
  misc_feature 20..21: note = DNA
agcccgtggtggaggttcttt

SEQ ID NO: 839 - DNA, 21 bp, synthetic construct
  source 1..21: mol_type = other DNA
  modified_base 1: mod_base = OTHER; note = guanosine-3'-phosphate
  modified_base 2: mod_base = OTHER; note = uridine-3'-phosphate
  modified_base 3: mod_base = OTHER; note = guanosine-3'-phosphate
  modified_base 4: mod_base = OTHER; note = guanosine-3'-phosphate
  modified_base 5: mod_base = OTHER; note = adenosine-3'-phosphate
  modified_base 6: mod_base = OTHER; note = guanosine-3'-phosphate
  modified_base 7: mod_base = OTHER; note = guanosine-3'-phosphate
  modified_base 8: mod_base = OTHER; note = uridine-3'-phosphate
  modified_base 9: mod_base = OTHER; note = uridine-3'-phosphate
  modified_base 10: mod_base = OTHER; note = cytidine-3'-phosphate
  modified_base 11: mod_base = OTHER; note = uridine-3'-phosphate
  modified_base 12: mod_base = OTHER; note = guanosine-3'-phosphate
  modified_base 13: mod_base = OTHER; note = guanosine-3'-phosphate
  modified_base 14: mod_base = OTHER; note = cytidine-3'-phosphate
  modified_base 15: mod_base = OTHER; note = guanosine-3'-phosphate
  modified_base 16: mod_base = OTHER; note = uridine-3'-phosphate
  modified_base 17: mod_base = OTHER; note = cytidine-3'-phosphate
  modified_base 18: mod_base = OTHER; note = guanosine-3'-phosphate
  modified_base 19: mod_base = OTHER; note = guanosine-3'-phosphate
  misc_feature 1..19: note = RNA
  misc_feature 20..21: note = DNA
gtggaggttctggcgtcggtt

SEQ ID NO: 840 - DNA, 21 bp, synthetic construct
  source 1..21: mol_type = other DNA
  modified_base 1: mod_base = OTHER; note = uridine-3'-phosphate
  modified_base 2: mod_base = OTHER; note = guanosine-3'-phosphate
  modified_base 3: mod_base = OTHER; note = guanosine-3'-phosphate
  modified_base 4: mod_base = OTHER; note = cytidine-3'-phosphate
  modified_base 5: mod_base = OTHER; note = guanosine-3'-phosphate
  modified_base 6: mod_base = OTHER; note = uridine-3'-phosphate
  modified_base 7: mod_base = OTHER; note = cytidine-3'-phosphate
  modified_base 8: mod_base = OTHER; note = guanosine-3'-phosphate
  modified_base 9: mod_base = OTHER; note = guanosine-3'-phosphate
  modified_base 10: mod_base = OTHER; note = guanosine-3'-phosphate
  modified_base 11: mod_base = OTHER; note = guanosine-3'-phosphate
  modified_base 12: mod_base = OTHER; note = guanosine-3'-phosphate
  modified_base 13: mod_base = OTHER; note = cytidine-3'-phosphate
  modified_base 14: mod_base = OTHER; note = cytidine-3'-phosphate
  modified_base 15: mod_base = OTHER; note = adenosine-3'-phosphate
  modified_base 16: mod_base = OTHER; note = uridine-3'-phosphate
  modified_base 17: mod_base = OTHER; note = cytidine-3'-phosphate
  modified_base 18: mod_base = OTHER; note = adenosine-3'-phosphate
  modified_base 19: mod_base = OTHER; note = uridine-3'-phosphate
  misc_feature 1..19: note = RNA
  misc_feature 20..21: note = DNA
tggcgtcgggggccatcattt

SEQ ID NO: 841 - DNA, 21 bp, synthetic construct
  source 1..21: mol_type = other DNA
  modified_base 1: mod_base = OTHER; note = cytidine-3'-phosphate
  modified_base 2: mod_base = OTHER; note = cytidine-3'-phosphate
  modified_base 3: mod_base = OTHER; note = adenosine-3'-phosphate
  modified_base 4: mod_base = OTHER; note = uridine-3'-phosphate
  modified_base 5: mod_base = OTHER; note = cytidine-3'-phosphate
  modified_base 6: mod_base = OTHER; note = adenosine-3'-phosphate
  modified_base 7: mod_base = OTHER; note = uridine-3'-phosphate
  modified_base 8: mod_base = OTHER; note = guanosine-3'-phosphate
  modified_base 9: mod_base = OTHER; note = guanosine-3'-phosphate
  modified_base 10: mod_base = OTHER; note = cytidine-3'-phosphate
  modified_base 11: mod_base = OTHER; note = guanosine-3'-phosphate
  modified_base 12: mod_base = OTHER; note = guanosine-3'-phosphate
  modified_base 13: mod_base = OTHER; note = uridine-3'-phosphate
  modified_base 14: mod_base = OTHER; note = cytidine-3'-phosphate
  modified_base 15: mod_base = OTHER; note = guanosine-3'-phosphate
  modified_base 16: mod_base = OTHER; note = uridine-3'-phosphate
  modified_base 17: mod_base = OTHER; note = cytidine-3'-phosphate
  modified_base 18: mod_base = OTHER; note = uridine-3'-phosphate
  modified_base 19: mod_base = OTHER; note = guanosine-3'-phosphate
  misc_feature 1..19: note = RNA
  misc_feature 20..21: note = DNA
ccatcatggcggtcgtctgtt

SEQ ID NO: 842 - DNA, 21 bp, synthetic construct
  source 1..21: mol_type = other DNA
  modified_base 1: mod_base = OTHER; note = guanosine-3'-phosphate
  modified_base 2: mod_base = OTHER; note = cytidine-3'-phosphate
  modified_base 3: mod_base = OTHER; note = guanosine-3'-phosphate
  modified_base 4: mod_base = OTHER; note = guanosine-3'-phosphate
  modified_base 5: mod_base = OTHER; note = uridine-3'-phosphate
  modified_base 6: mod_base = OTHER; note = cytidine-3'-phosphate
  modified_base 7: mod_base = OTHER; note = guanosine-3'-phosphate
  modified_base 8: mod_base = OTHER; note = uridine-3'-phosphate
  modified_base 9: mod_base = OTHER; note = cytidine-3'-phosphate
  modified_base 10: mod_base = OTHER; note = uridine-3'-phosphate
  modified_base 11: mod_base = OTHER; note = guanosine-3'-phosphate
  modified_base 12: mod_base = OTHER; note = guanosine-3'-phosphate
  modified_base 13: mod_base = OTHER; note = adenosine-3'-phosphate
  modified_base 14: mod_base = OTHER; note = adenosine-3'-phosphate
  modified_base 15: mod_base = OTHER; note = guanosine-3'-phosphate
  modified_base 16: mod_base = OTHER; note = adenosine-3'-phosphate
  modified_base 17: mod_base = OTHER; note = adenosine-3'-phosphate
  modified_base 18: mod_base = OTHER; note = guanosine-3'-phosphate
  modified_base 19: mod_base = OTHER; note = guanosine-3'-phosphate
  misc_feature 1..19: note = RNA
  misc_feature 20..21: note = DNA
gcggtcgtctggaagaaggtt

SEQ ID NO: 843 - DNA, 21 bp, synthetic construct
  source 1..21: mol_type = other DNA
  modified_base 1: mod_base = OTHER; note = guanosine-3'-phosphate
  modified_base 2: mod_base = OTHER; note = guanosine-3'-phosphate
  modified_base 3: mod_base = OTHER; note = adenosine-3'-phosphate
  modified_base 4: mod_base = OTHER; note = adenosine-3'-phosphate
  modified_base 5: mod_base = OTHER; note = guanosine-3'-phosphate
  modified_base 6: mod_base = OTHER; note = adenosine-3'-phosphate
  modified_base 7: mod_base = OTHER; note = adenosine-3'-phosphate
  modified_base 8: mod_base = OTHER; note = guanosine-3'-phosphate
  modified_base 9: mod_base = OTHER; note = guanosine-3'-phosphate
  modified_base 10: mod_base = OTHER; note = guanosine-3'-phosphate
  modified_base 11: mod_base = OTHER; note = cytidine-3'-phosphate
  modified_base 12: mod_base = OTHER; note = cytidine-3'-phosphate
  modified_base 13: mod_base = OTHER; note = uridine-3'-phosphate
  modified_base 14: mod_base = OTHER; note = guanosine-3'-phosphate
  modified_base 15: mod_base = OTHER; note = cytidine-3'-phosphate
  modified_base 16: mod_base = OTHER; note = adenosine-3'-phosphate
  modified_base 17: mod_base = OTHER; note = cytidine-3'-phosphate
  modified_base 18: mod_base = OTHER; note = adenosine-3'-phosphate
  modified_base 19: mod_base = OTHER; note = guanosine-3'-phosphate
  misc_feature 1..19: note = RNA
  misc_feature 20..21: note = DNA
ggaagaagggcctgcacagtt

SEQ ID NO: 844 - DNA, 21 bp, synthetic construct
  source 1..21: mol_type = other DNA
  modified_base 1: mod_base = OTHER; note = cytidine-3'-phosphate
  modified_base 2: mod_base = OTHER; note = cytidine-3'-phosphate
  modified_base 3: mod_base = OTHER; note = uridine-3'-phosphate
  modified_base 4: mod_base = OTHER; note = guanosine-3'-phosphate
  modified_base 5: mod_base = OTHER; note = cytidine-3'-phosphate
  modified_base 6: mod_base = OTHER; note = adenosine-3'-phosphate
  modified_base 7: mod_base = OTHER; note = cytidine-3'-phosphate
  modified_base 8: mod_base = OTHER; note = adenosine-3'-phosphate
  modified_base 9: mod_base = OTHER; note = guanosine-3'-phosphate
  modified_base 10: mod_base = OTHER; note = cytidine-3'-phosphate
  modified_base 11: mod_base = OTHER; note = uridine-3'-phosphate
  modified_base 12: mod_base = OTHER; note = adenosine-3'-phosphate
  modified_base 13: mod_base = OTHER; note = cytidine-3'-phosphate
  modified_base 14: mod_base = OTHER; note = uridine-3'-phosphate
  modified_base 15: mod_base = OTHER; note = adenosine-3'-phosphate
  modified_base 16: mod_base = OTHER; note = cytidine-3'-phosphate
  modified_base 17: mod_base = OTHER; note = guanosine-3'-phosphate
  modified_base 18: mod_base = OTHER; note = adenosine-3'-phosphate
  modified_base 19: mod_base = OTHER; note = cytidine-3'-phosphate
  misc_feature 1..19: note = RNA
  misc_feature 20..21: note = DNA
cctgcacagctactacgactt

SEQ ID NO: 845 - DNA, 21 bp, synthetic construct
  source 1..21: mol_type = other DNA
  modified_base 1: mod_base = OTHER; note = adenosine-3'-phosphate
  modified_base 2: mod_base = OTHER; note = cytidine-3'-phosphate
  modified_base 3: mod_base = OTHER; note = uridine-3'-phosphate
  modified_base 4: mod_base = OTHER; note = adenosine-3'-phosphate
  modified_base 5: mod_base = OTHER; note = cytidine-3'-phosphate
  modified_base 6: mod_base = OTHER; note = guanosine-3'-phosphate
  modified_base 7: mod_base = OTHER; note = adenosine-3'-phosphate
  modified_base 8: mod_base = OTHER; note = cytidine-3'-phosphate
  modified_base 9: mod_base = OTHER; note = cytidine-3'-phosphate
  modified_base 10: mod_base = OTHER; note = cytidine-3'-phosphate
  modified_base 11: mod_base = OTHER; note = cytidine-3'-phosphate
  modified_base 12: mod_base = OTHER; note = uridine-3'-phosphate
  modified_base 13: mod_base = OTHER; note = uridine-3'-phosphate
  modified_base 14: mod_base = OTHER; note = cytidine-3'-phosphate
  modified_base 15: mod_base = OTHER; note = guanosine-3'-phosphate
  modified_base 16: mod_base = OTHER; note = uridine-3'-phosphate
  modified_base 17: mod_base = OTHER; note = guanosine-3'-phosphate
  modified_base 18: mod_base = OTHER; note = cytidine-3'-phosphate
  modified_base 19: mod_base = OTHER; note = uridine-3'-phosphate
  misc_feature 1..19: note = RNA
  misc_feature 20..21: note = DNA
actacgaccccttcgtgcttt

SEQ ID NO: 846 - DNA, 21 bp, synthetic construct
  source 1..21: mol_type = other DNA
  modified_base 1: mod_base = OTHER; note = cytidine-3'-phosphate
  modified_base 2: mod_base = OTHER; note = cytidine-3'-phosphate
  modified_base 3: mod_base = OTHER; note = uridine-3'-phosphate
  modified_base 4: mod_base = OTHER; note = uridine-3'-phosphate
  modified_base 5: mod_base = OTHER; note = cytidine-3'-phosphate
  modified_base 6: mod_base = OTHER; note = guanosine-3'-phosphate
  modified_base 7: mod_base = OTHER; note = uridine-3'-phosphate
  modified_base 8: mod_base = OTHER; note = guanosine-3'-phosphate
  modified_base 9: mod_base = OTHER; note = cytidine-3'-phosphate
  modified_base 10: mod_base = OTHER; note = uridine-3'-phosphate
  modified_base 11: mod_base = OTHER; note = cytidine-3'-phosphate
  modified_base 12: mod_base = OTHER; note = uridine-3'-phosphate
  modified_base 13: mod_base = OTHER; note = cytidine-3'-phosphate
  modified_base 14: mod_base = OTHER; note = cytidine-3'-phosphate
  modified_base 15: mod_base = OTHER; note = guanosine-3'-phosphate
  modified_base 16: mod_base = OTHER; note = uridine-3'-phosphate
  modified_base 17: mod_base = OTHER; note = guanosine-3'-phosphate
  modified_base 18: mod_base = OTHER; note = cytidine-3'-phosphate
  modified_base 19: mod_base = OTHER; note = adenosine-3'-phosphate
  misc_feature 1..19: note = RNA
  misc_feature 20..21: note = DNA
ccttcgtgctctccgtgcatt

SEQ ID NO: 847 - DNA, 21 bp, synthetic construct
  source 1..21: mol_type = other DNA
  modified_base 1: mod_base = OTHER; note = cytidine-3'-phosphate
  modified_base 2: mod_base = OTHER; note = cytidine-3'-phosphate
  modified_base 3: mod_base = OTHER; note = guanosine-3'-phosphate
  modified_base 4: mod_base = OTHER; note = uridine-3'-phosphate
  modified_base 5: mod_base = OTHER; note = guanosine-3'-phosphate
  modified_base 6: mod_base = OTHER; note = cytidine-3'-phosphate
  modified_base 7: mod_base = OTHER; note = adenosine-3'-phosphate
  modified_base 8: mod_base = OTHER; note = guanosine-3'-phosphate
  modified_base 9: mod_base = OTHER; note = cytidine-3'-phosphate
  modified_base 10: mod_base = OTHER; note = cytidine-3'-phosphate
  modified_base 11: mod_base = OTHER; note = guanosine-3'-phosphate
  modified_base 12: mod_base = OTHER; note = guanosine-3'-phosphate
  modified_base 13: mod_base = OTHER; note = uridine-3'-phosphate
  modified_base 14: mod_base = OTHER; note = guanosine-3'-phosphate
  modified_base 15: mod_base = OTHER; note = guanosine-3'-phosphate
  modified_base 16: mod_base = OTHER; note = uridine-3'-phosphate
  modified_base 17: mod_base = OTHER; note = cytidine-3'-phosphate
  modified_base 18: mod_base = OTHER; note = uridine-3'-phosphate
  modified_base 19: mod_base = OTHER; note = uridine-3'-phosphate
  misc_feature 1..19: note = RNA
  misc_feature 20..21: note = DNA
ccgtgcagccggtggtctttt

SEQ ID NO: 848 - DNA, 21 bp, synthetic construct
  source 1..21: mol_type = other DNA
  modified_base 1: mod_base = OTHER; note = cytidine-3'-phosphate
  modified_base 2: mod_base = OTHER; note = guanosine-3'-phosphate
  modified_base 3: mod_base = OTHER; note = guanosine-3'-phosphate
  modified_base 4: mod_base = OTHER; note = uridine-3'-phosphate
  modified_base 5: mod_base = OTHER; note = guanosine-3'-phosphate
  modified_base 6: mod_base = OTHER; note = guanosine-3'-phosphate
  modified_base 7: mod_base = OTHER; note = uridine-3'-phosphate
  modified_base 8: mod_base = OTHER; note = cytidine-3'-phosphate
  modified_base 9: mod_base = OTHER; note = uridine-3'-phosphate
  modified_base 10: mod_base = OTHER; note = uridine-3'-phosphate
  modified_base 11: mod_base = OTHER; note = cytidine-3'-phosphate
  modified_base 12: mod_base = OTHER; note = cytidine-3'-phosphate
  modified_base 13: mod_base = OTHER; note = adenosine-3'-phosphate
  modified_base 14: mod_base = OTHER; note = guanosine-3'-phosphate
  modified_base 15: mod_base = OTHER; note = guanosine-3'-phosphate
  modified_base 16: mod_base = OTHER; note = cytidine-3'-phosphate
  modified_base 17: mod_base = OTHER; note = cytidine-3'-phosphate
  modified_base 18: mod_base = OTHER; note = uridine-3'-phosphate
  modified_base 19: mod_base = OTHER; note = guanosine-3'-phosphate
  misc_feature 1..19: note = RNA
  misc_feature 20..21: note = DNA
cggtggtcttccaggcctgtt

SEQ ID NO: 849 - DNA, 21 bp, synthetic construct
  source 1..21: mol_type = other DNA
  modified_base 1: mod_base = OTHER; note = adenosine-3'-phosphate
  modified_base 2: mod_base = OTHER; note = guanosine-3'-phosphate
  modified_base 3: mod_base = OTHER; note = guanosine-3'-phosphate
  modified_base 4: mod_base = OTHER; note = cytidine-3'-phosphate
  modified_base 5: mod_base = OTHER; note = cytidine-3'-phosphate
  modified_base 6: mod_base = OTHER; note = uridine-3'-phosphate
  modified_base 7: mod_base = OTHER; note = guanosine-3'-phosphate
  modified_base 8: mod_base = OTHER; note = uridine-3'-phosphate
  modified_base 9: mod_base = OTHER; note = guanosine-3'-phosphate
  modified_base 10: mod_base = OTHER; note = adenosine-3'-phosphate
  modified_base 11: mod_base = OTHER; note = adenosine-3'-phosphate
  modified_base 12: mod_base = OTHER; note = guanosine-3'-phosphate
  modified_base 13: mod_base = OTHER; note = uridine-3'-phosphate
  modified_base 14: mod_base = OTHER; note = guanosine-3'-phosphate
  modified_base 15: mod_base = OTHER; note = adenosine-3'-phosphate
  modified_base 16: mod_base = OTHER; note = adenosine-3'-phosphate
  modified_base 17: mod_base = OTHER; note = cytidine-3'-phosphate
  modified_base 18: mod_base = OTHER; note = cytidine-3'-phosphate
  modified_base 19: mod_base = OTHER; note = uridine-3'-phosphate
  misc_feature 1..19: note = RNA
  misc_feature 20..21: note = DNA
aggcctgtgaagtgaaccttt

SEQ ID NO: 850 - DNA, 21 bp, synthetic construct
  source 1..21: mol_type = other DNA
  modified_base 1: mod_base = OTHER; note = adenosine-3'-phosphate
  modified_base 2: mod_base = OTHER; note = adenosine-3'-phosphate
  modified_base 3: mod_base = OTHER; note = guanosine-3'-phosphate
  modified_base 4: mod_base = OTHER; note = uridine-3'-phosphate
  modified_base 5: mod_base = OTHER; note = guanosine-3'-phosphate
  modified_base 6: mod_base = OTHER; note = adenosine-3'-phosphate
  modified_base 7: mod_base = OTHER; note = adenosine-3'-phosphate
  modified_base 8: mod_base = OTHER; note = cytidine-3'-phosphate
  modified_base 9: mod_base = OTHER; note = cytidine-3'-phosphate
  modified_base 10: mod_base = OTHER; note = uridine-3'-phosphate
  modified_base 11: mod_base = OTHER; note = guanosine-3'-phosphate
  modified_base 12: mod_base = OTHER; note = adenosine-3'-phosphate
  modified_base 13: mod_base = OTHER; note = cytidine-3'-phosphate
  modified_base 14: mod_base = OTHER; note = guanosine-3'-phosphate
  modified_base 15: mod_base = OTHER; note = cytidine-3'-phosphate
  modified_base 16: mod_base = OTHER; note = uridine-3'-phosphate
  modified_base 17: mod_base = OTHER; note = guanosine-3'-phosphate
  modified_base 18: mod_base = OTHER; note = guanosine-3'-phosphate
  modified_base 19: mod_base = OTHER; note = adenosine-3'-phosphate
  misc_feature 1..19: note = RNA
  misc_feature 20..21: note = DNA
aagtgaacctgacgctggatt

SEQ ID NO: 851 - DNA, 21 bp, synthetic construct
  source 1..21: mol_type = other DNA
  modified_base 1: mod_base = OTHER; note = guanosine-3'-phosphate
  modified_base 2: mod_base = OTHER; note = adenosine-3'-phosphate
  modified_base 3: mod_base = OTHER; note = cytidine-3'-phosphate
  modified_base 4: mod_base = OTHER; note = guanosine-3'-phosphate
  modified_base 5: mod_base = OTHER; note = cytidine-3'-phosphate
  modified_base 6: mod_base = OTHER; note = uridine-3'-phosphate
  modified_base 7: mod_base = OTHER; note = guanosine-3'-phosphate
  modified_base 8: mod_base = OTHER; note = guanosine-3'-phosphate
  modified_base 9: mod_base = OTHER; note = adenosine-3'-phosphate
  modified_base 10: mod_base = OTHER; note = cytidine-3'-phosphate
  modified_base 11: mod_base = OTHER; note = adenosine-3'-phosphate
  modified_base 12: mod_base = OTHER; note = adenosine-3'-phosphate
  modified_base 13: mod_base = OTHER; note = cytidine-3'-phosphate
  modified_base 14: mod_base = OTHER; note = adenosine-3'-phosphate
  modified_base 15: mod_base = OTHER; note = guanosine-3'-phosphate
  modified_base 16: mod_base = OTHER; note = guanosine-3'-phosphate
  modified_base 17: mod_base = OTHER; note = cytidine-3'-phosphate
  modified_base 18: mod_base = OTHER; note = uridine-3'-phosphate
  modified_base 19: mod_base = OTHER; note = cytidine-3'-phosphate
  misc_feature 1..19: note = RNA
  misc_feature 20..21: note = DNA
gacgctggacaacaggctctt

SEQ ID NO: 852 - DNA, 21 bp, synthetic construct
  source 1..21: mol_type = other DNA
  modified_base 1: mod_base = OTHER; note = adenosine-3'-phosphate
  modified_base 2: mod_base = OTHER; note = cytidine-3'-phosphate
  modified_base 3: mod_base = OTHER; note = adenosine-3'-phosphate
  modified_base 4: mod_base = OTHER; note = adenosine-3'-phosphate
  modified_base 5: mod_base = OTHER; note = cytidine-3'-phosphate
  modified_base 6: mod_base = OTHER; note = adenosine-3'-phosphate
  modified_base 7: mod_base = OTHER; note = guanosine-3'-phosphate
  modified_base 8: mod_base = OTHER; note = guanosine-3'-phosphate
  modified_base 9: mod_base = OTHER; note = cytidine-3'-phosphate
  modified_base 10: mod_base = OTHER; note = uridine-3'-phosphate
  modified_base 11: mod_base = OTHER; note = cytidine-3'-phosphate
  modified_base 12: mod_base = OTHER; note = guanosine-3'-phosphate
  modified_base 13: mod_base = OTHER; note = adenosine-3'-phosphate
  modified_base 14: mod_base = OTHER; note = cytidine-3'-phosphate
  modified_base 15: mod_base = OTHER; note = uridine-3'-phosphate
  modified_base 16: mod_base = OTHER; note = cytidine-3'-phosphate
  modified_base 17: mod_base = OTHER; note = cytidine-3'-phosphate
  modified_base 18: mod_base = OTHER; note = cytidine-3'-phosphate
  modified_base 19: mod_base = OTHER; note = adenosine-3'-phosphate
  misc_feature 1..19: note = RNA
  misc_feature 20..21: note = DNA
acaacaggctcgactcccatt

SEQ ID NO: 853 - DNA, 21 bp, synthetic construct
  source 1..21: mol_type = other DNA
  modified_base 1: mod_base = OTHER; note = adenosine-3'-phosphate
  modified_base 2: mod_base = OTHER; note = cytidine-3'-phosphate
  modified_base 3: mod_base = OTHER; note = uridine-3'-phosphate
  modified_base 4: mod_base = OTHER; note = cytidine-3'-phosphate
  modified_base 5: mod_base = OTHER; note = cytidine-3'-phosphate
  modified_base 6: mod_base = OTHER; note = cytidine-3'-phosphate
  modified_base 7: mod_base = OTHER; note = adenosine-3'-phosphate
  modified_base 8: mod_base = OTHER; note = guanosine-3'-phosphate
  modified_base 9: mod_base = OTHER; note = guanosine-3'-phosphate
  modified_base 10: mod_base = OTHER; note = guanosine-3'-phosphate
  modified_base 11: mod_base = OTHER; note = cytidine-3'-phosphate
  modified_base 12: mod_base = OTHER; note = guanosine-3'-phosphate
  modified_base 13: mod_base = OTHER; note = uridine-3'-phosphate
  modified_base 14: mod_base = OTHER; note = cytidine-3'-phosphate
  modified_base 15: mod_base = OTHER; note = cytidine-3'-phosphate
  modified_base 16: mod_base = OTHER; note = uridine-3'-phosphate
  modified_base 17: mod_base = OTHER; note = cytidine-3'-phosphate
  modified_base 18: mod_base = OTHER; note = adenosine-3'-phosphate
  modified_base 19: mod_base = OTHER; note = guanosine-3'-phosphate
  misc_feature 1..19: note = RNA
  misc_feature 20..21: note = DNA
actcccagggcgtcctcagtt

SEQ ID NO: 854 - DNA, 21 bp, synthetic construct
  source 1..21: mol_type = other DNA
  modified_base 1: mod_base = OTHER; note = cytidine-3'-phosphate
  modified_base 2: mod_base = OTHER; note = cytidine-3'-phosphate
  modified_base 3: mod_base = OTHER; note = cytidine-3'-phosphate
  modified_base 4: mod_base = OTHER; note = cytidine-3'-phosphate
  modified_base 5: mod_base = OTHER; note = guanosine-3'-phosphate
  modified_base 6: mod_base = OTHER; note = uridine-3'-phosphate
  modified_base 7: mod_base = OTHER; note = adenosine-3'-phosphate
  modified_base 8: mod_base = OTHER; note = cytidine-3'-phosphate
  modified_base 9: mod_base = OTHER; note = uridine-3'-phosphate
  modified_base 10: mod_base = OTHER; note = uridine-3'-phosphate
  modified_base 11: mod_base = OTHER; note = cytidine-3'-phosphate
  modified_base 12: mod_base = OTHER; note = cytidine-3'-phosphate
  modified_base 13: mod_base = OTHER; note = cytidine-3'-phosphate
  modified_base 14: mod_base = OTHER; note = cytidine-3'-phosphate
  modified_base 15: mod_base = OTHER; note = adenosine-3'-phosphate
  modified_base 16: mod_base = OTHER; note = guanosine-3'-phosphate
  modified_base 17: mod_base = OTHER; note = cytidine-3'-phosphate
  modified_base 18: mod_base = OTHER; note = uridine-3'-phosphate
  modified_base 19: mod_base = OTHER; note = adenosine-3'-phosphate
  misc_feature 1..19: note = RNA
  misc_feature 20..21: note = DNA
ccccgtacttccccagctatt

SEQ ID NO: 855 - DNA, 21 bp, synthetic construct
  source 1..21: mol_type = other DNA
  modified_base 1: mod_base = OTHER; note = uridine-3'-phosphate
  modified_base 2: mod_base = OTHER; note = uridine-3'-phosphate
  modified_base 3: mod_base = OTHER; note = cytidine-3'-phosphate
  modified_base 4: mod_base = OTHER; note = cytidine-3'-phosphate
  modified_base 5: mod_base = OTHER; note = cytidine-3'-phosphate
  modified_base 6: mod_base = OTHER; note = cytidine-3'-phosphate
  modified_base 7: mod_base = OTHER; note = adenosine-3'-phosphate
  modified_base 8: mod_base = OTHER; note = guanosine-3'-phosphate
  modified_base 9: mod_base = OTHER; note = cytidine-3'-phosphate
  modified_base 10: mod_base = OTHER; note = uridine-3'-phosphate
  modified_base 11: mod_base = OTHER; note = adenosine-3'-phosphate
  modified_base 12: mod_base = OTHER; note = cytidine-3'-phosphate
  modified_base 13: mod_base = OTHER; note = uridine-3'-phosphate
  modified_base 14: mod_base = OTHER; note = adenosine-3'-phosphate
  modified_base 15: mod_base = OTHER; note = cytidine-3'-phosphate
  modified_base 16: mod_base = OTHER; note = uridine-3'-phosphate
  modified_base 17: mod_base = OTHER; note = cytidine-3'-phosphate
  modified_base 18: mod_base = OTHER; note = guanosine-3'-phosphate
  modified_base 19: mod_base = OTHER; note = cytidine-3'-phosphate
  misc_feature 1..19: note = RNA
  misc_feature 20..21: note = DNA
ttccccagctactactcgctt

SEQ ID NO: 856 - DNA, 21 bp, synthetic construct
  source 1..21: mol_type = other DNA
  modified_base 1: mod_base = OTHER; note = adenosine-3'-phosphate
  modified_base 2: mod_base = OTHER; note = cytidine-3'-phosphate
  modified_base 3: mod_base = OTHER; note = uridine-3'-phosphate
  modified_base 4: mod_base = OTHER; note = adenosine-3'-phosphate
  modified_base 5: mod_base = OTHER; note = cytidine-3'-phosphate
  modified_base 6: mod_base = OTHER; note = uridine-3'-phosphate
  modified_base 7: mod_base = OTHER; note = cytidine-3'-phosphate
  modified_base 8: mod_base = OTHER; note = guanosine-3'-phosphate
  modified_base 9: mod_base = OTHER; note = cytidine-3'-phosphate
  modified_base 10: mod_base = OTHER; note = cytidine-3'-phosphate
  modified_base 11: mod_base = OTHER; note = cytidine-3'-phosphate
  modified_base 12: mod_base = OTHER; note = cytidine-3'-phosphate
  modified_base 13: mod_base = OTHER; note = adenosine-3'-phosphate
  modified_base 14: mod_base = OTHER; note = adenosine-3'-phosphate
  modified_base 15: mod_base = OTHER; note = adenosine-3'-phosphate
  modified_base 16: mod_base = OTHER; note = cytidine-3'-phosphate
  modified_base 17: mod_base = OTHER; note = cytidine-3'-phosphate
  modified_base 18: mod_base = OTHER; note = cytidine-3'-phosphate
  modified_base 19: mod_base = OTHER; note = adenosine-3'-phosphate
  misc_feature 1..19: note = RNA
  misc_feature 20..21: note = DNA
actactcgccccaaacccatt

SEQ ID NO: 857 - DNA, 21 bp, synthetic construct
  source 1..21: mol_type = other DNA
  modified_base 1: mod_base = OTHER; note = cytidine-3'-phosphate
  modified_base 2: mod_base = OTHER; note = cytidine-3'-phosphate
  modified_base 3: mod_base = OTHER; note = cytidine-3'-phosphate
  modified_base 4: mod_base = OTHER; note = adenosine-3'-phosphate
  modified_base 5: mod_base = OTHER; note = adenosine-3'-phosphate
  modified_base 6: mod_base = OTHER; note = adenosine-3'-phosphate
  modified_base 7: mod_base = OTHER; note = cytidine-3'-phosphate
  modified_base 8: mod_base = OTHER; note = cytidine-3'-phosphate
  modified_base 9: mod_base = OTHER; note = cytidine-3'-phosphate
  modified_base 10: mod_base = OTHER; note = adenosine-3'-phosphate
  modified_base 11: mod_base = OTHER; note = cytidine-3'-phosphate
  modified_base 12: mod_base = OTHER; note = uridine-3'-phosphate
  modified_base 13: mod_base = OTHER; note = guanosine-3'-phosphate
  modified_base 14: mod_base = OTHER; note = cytidine-3'-phosphate
  modified_base 15: mod_base = OTHER; note = uridine-3'-phosphate
  modified_base 16: mod_base = OTHER; note = cytidine-3'-phosphate
  modified_base 17: mod_base = OTHER; note = cytidine-3'-phosphate
  modified_base 18: mod_base = OTHER; note = uridine-3'-phosphate
  modified_base 19: mod_base = OTHER; note = guanosine-3'-phosphate
  misc_feature 1..19: note = RNA
  misc_feature 20..21: note = DNA
cccaaacccactgctcctgtt

SEQ ID NO: 858 - DNA, 21 bp, synthetic construct
  source 1..21: mol_type = other DNA
  modified_base 1: mod_base = OTHER; note = guanosine-3'-phosphate
  modified_base 2: mod_base = OTHER; note = cytidine-3'-phosphate
  modified_base 3: mod_base = OTHER; note = uridine-3'-phosphate
  modified_base 4: mod_base = OTHER; note = cytidine-3'-phosphate
  modified_base 5: mod_base = OTHER; note = cytidine-3'-phosphate
  modified_base 6: mod_base = OTHER; note = uridine-3'-phosphate
  modified_base 7: mod_base = OTHER; note = guanosine-3'-phosphate
  modified_base 8: mod_base = OTHER; note = guanosine-3'-phosphate
  modified_base 9: mod_base = OTHER; note = cytidine-3'-phosphate
  modified_base 10: mod_base = OTHER; note = adenosine-3'-phosphate
  modified_base 11: mod_base = OTHER; note = cytidine-3'-phosphate
  modified_base 12: mod_base = OTHER; note = cytidine-3'-phosphate
  modified_base 13: mod_base = OTHER; note = uridine-3'-phosphate
  modified_base 14: mod_base = OTHER; note = cytidine-3'-phosphate
  modified_base 15: mod_base = OTHER; note = adenosine-3'-phosphate
  modified_base 16: mod_base = OTHER; note = cytidine-3'-phosphate
  modified_base 17: mod_base = OTHER; note = guanosine-3'-phosphate
  modified_base 18: mod_base = OTHER; note = guanosine-3'-phosphate
  modified_base 19: mod_base = OTHER; note = uridine-3'-phosphate
  misc_feature 1..19: note = RNA
  misc_feature 20..21: note = DNA
gctcctggcacctcacggttt

SEQ ID NO: 859 - DNA, 21 bp, synthetic construct
  source 1..21: mol_type = other DNA
  modified_base 1: mod_base = OTHER; note = adenosine-3'-phosphate
  modified_base 2: mod_base = OTHER; note = cytidine-3'-phosphate
  modified_base 3: mod_base = OTHER; note = cytidine-3'-phosphate
  modified_base 4: mod_base = OTHER; note = uridine-3'-phosphate
  modified_base 5: mod_base = OTHER; note = cytidine-3'-phosphate
  modified_base 6: mod_base = OTHER; note = adenosine-3'-phosphate
  modified_base 7: mod_base = OTHER; note = cytidine-3'-phosphate
  modified_base 8: mod_base = OTHER; note = guanosine-3'-phosphate
  modified_base 9: mod_base = OTHER; note = guanosine-3'-phosphate
  modified_base 10: mod_base = OTHER; note = uridine-3'-phosphate
  modified_base 11: mod_base = OTHER; note = guanosine-3'-phosphate
  modified_base 12: mod_base = OTHER; note = cytidine-3'-phosphate
  modified_base 13: mod_base = OTHER; note = cytidine-3'-phosphate
  modified_base 14: mod_base = OTHER; note = cytidine-3'-phosphate
  modified_base 15: mod_base = OTHER; note = uridine-3'-phosphate
  modified_base 16: mod_base = OTHER; note = cytidine-3'-phosphate
  modified_base 17: mod_base = OTHER; note = uridine-3'-phosphate
  modified_base 18: mod_base = OTHER; note = cytidine-3'-phosphate
  modified_base 19: mod_base = OTHER; note = uridine-3'-phosphate
  misc_feature 1..19: note = RNA
  misc_feature 20..21: note = DNA
acctcacggtgccctctcttt

SEQ ID NO: 860 - DNA, 21 bp, synthetic construct
  source 1..21: mol_type = other DNA
  modified_base 1: mod_base = OTHER; note = cytidine-3'-phosphate
  modified_base 2: mod_base = OTHER; note = uridine-3'-phosphate
  modified_base 3: mod_base = OTHER; note = cytidine-3'-phosphate
  modified_base 4: mod_base = OTHER; note = uridine-3'-phosphate
  modified_base 5: mod_base = OTHER; note = cytidine-3'-phosphate
  modified_base 6: mod_base = OTHER; note = uridine-3'-phosphate
  modified_base 7: mod_base = OTHER; note = guanosine-3'-phosphate
  modified_base 8: mod_base = OTHER; note = guanosine-3'-phosphate
  modified_base 9: mod_base = OTHER; note = adenosine-3'-phosphate
  modified_base 10: mod_base = OTHER; note = cytidine-3'-phosphate
  modified_base 11: mod_base = OTHER; note = uridine-3'-phosphate
  modified_base 12: mod_base = OTHER; note = adenosine-3'-phosphate
  modified_base 13: mod_base = OTHER; note = cytidine-3'-phosphate
  modified_base 14: mod_base = OTHER; note = guanosine-3'-phosphate
  modified_base 15: mod_base = OTHER; note = guanosine-3'-phosphate
  modified_base 16: mod_base = OTHER; note = cytidine-3'-phosphate
  modified_base 17: mod_base = OTHER; note = uridine-3'-phosphate
  modified_base 18: mod_base = OTHER; note = uridine-3'-phosphate
  modified_base 19: mod_base = OTHER; note = guanosine-3'-phosphate
  misc_feature 1..19: note = RNA
  misc_feature 20..21: note = DNA
ctctctggactacggcttgtt

SEQ ID NO: 861 - DNA, 21 bp, synthetic construct
  source 1..21: mol_type = other DNA
  modified_base 1: mod_base = OTHER; note = guanosine-3'-phosphate
  modified_base 2: mod_base = OTHER; note = adenosine-3'-phosphate
  modified_base 3: mod_base = OTHER; note = cytidine-3'-phosphate
  modified_base 4: mod_base = OTHER; note = uridine-3'-phosphate
  modified_base 5: mod_base = OTHER; note = adenosine-3'-phosphate
  modified_base 6: mod_base = OTHER; note = cytidine-3'-phosphate
  modified_base 7: mod_base = OTHER; note = guanosine-3'-phosphate
  modified_base 8: mod_base = OTHER; note = guanosine-3'-phosphate
  modified_base 9: mod_base = OTHER; note = cytidine-3'-phosphate
  modified_base 10: mod_base = OTHER; note = uridine-3'-phosphate
  modified_base 11: mod_base = OTHER; note = uridine-3'-phosphate
  modified_base 12: mod_base = OTHER; note = guanosine-3'-phosphate
  modified_base 13: mod_base = OTHER; note = guanosine-3'-phosphate
  modified_base 14: mod_base = OTHER; note = cytidine-3'-phosphate
  modified_base 15: mod_base = OTHER; note = cytidine-3'-phosphate
  modified_base 16: mod_base = OTHER; note = cytidine-3'-phosphate
  modified_base 17: mod_base = OTHER; note = uridine-3'-phosphate
  modified_base 18: mod_base = OTHER; note = cytidine-3'-phosphate
  modified_base 19: mod_base = OTHER; note = uridine-3'-phosphate
  misc_feature 1..19: note = RNA
  misc_feature 20..21: note = DNA
gactacggcttggccctcttt

SEQ ID NO: 862 - DNA, 21 bp, synthetic construct
  source 1..21: mol_type = other DNA
  modified_base 1: mod_base = OTHER; note = cytidine-3'-phosphate
  modified_base 2: mod_base = OTHER; note = cytidine-3'-phosphate
  modified_base 3: mod_base = OTHER; note = cytidine-3'-phosphate
  modified_base 4: mod_base = OTHER; note = uridine-3'-phosphate
  modified_base 5: mod_base = OTHER; note = cytidine-3'-phosphate
  modified_base 6: mod_base = OTHER; note = uridine-3'-phosphate
  modified_base 7: mod_base = OTHER; note = guanosine-3'-phosphate
  modified_base 8: mod_base = OTHER; note = guanosine-3'-phosphate
  modified_base 9: mod_base = OTHER; note = uridine-3'-phosphate
  modified_base 10: mod_base = OTHER; note = uridine-3'-phosphate
  modified_base 11: mod_base = OTHER; note = uridine-3'-phosphate
  modified_base 12: mod_base = OTHER; note = guanosine-3'-phosphate
  modified_base 13: mod_base = OTHER; note = adenosine-3'-phosphate
  modified_base 14: mod_base = OTHER; note = uridine-3'-phosphate
  modified_base 15: mod_base = OTHER; note = guanosine-3'-phosphate
  modified_base 16: mod_base = OTHER; note = cytidine-3'-phosphate
  modified_base 17: mod_base = OTHER; note = cytidine-3'-phosphate
  modified_base 18: mod_base = OTHER; note = uridine-3'-phosphate
  modified_base 19: mod_base = OTHER; note = adenosine-3'-phosphate
  misc_feature 1..19: note = RNA
  misc_feature 20..21: note = DNA
ccctctggtttgatgcctatt

SEQ ID NO: 863 - DNA, 21 bp, synthetic construct
  source 1..21: mol_type = other DNA
  modified_base 1: mod_base = OTHER; note = guanosine-3'-phosphate
  modified_base 2: mod_base = OTHER; note = uridine-3'-phosphate
  modified_base 3: mod_base = OTHER; note = uridine-3'-phosphate
  modified_base 4: mod_base = OTHER; note = uridine-3'-phosphate
  modified_base 5: mod_base = OTHER; note = guanosine-3'-phosphate
  modified_base 6: mod_base = OTHER; note = adenosine-3'-phosphate
  modified_base 7: mod_base = OTHER; note = uridine-3'-phosphate
  modified_base 8: mod_base = OTHER; note = guanosine-3'-phosphate
  modified_base 9: mod_base = OTHER; note = cytidine-3'-phosphate
  modified_base 10: mod_base = OTHER; note = cytidine-3'-phosphate
  modified_base 11: mod_base = OTHER; note = uridine-3'-phosphate
  modified_base 12: mod_base = OTHER; note = adenosine-3'-phosphate
  modified_base 13: mod_base = OTHER; note = uridine-3'-phosphate
  modified_base 14: mod_base = OTHER; note = guanosine-3'-phosphate
  modified_base 15: mod_base = OTHER; note = cytidine-3'-phosphate
  modified_base 16: mod_base = OTHER; note = adenosine-3'-phosphate
  modified_base 17: mod_base = OTHER; note = cytidine-3'-phosphate
  modified_base 18: mod_base = OTHER; note = uridine-3'-phosphate
  modified_base 19: mod_base = OTHER; note = guanosine-3'-phosphate
  misc_feature 1..19: note = RNA
  misc_feature 20..21: note = DNA
gtttgatgcctatgcactgtt

SEQ ID NO: 864 - DNA, 21 bp, synthetic construct
  source 1..21: mol_type = other DNA
  modified_base 1: mod_base = OTHER; note = guanosine-3'-phosphate
  modified_base 2: mod_base = OTHER; note = cytidine-3'-phosphate
  modified_base 3: mod_base = OTHER; note = adenosine-3'-phosphate
  modified_base 4: mod_base = OTHER; note = cytidine-3'-phosphate
  modified_base 5: mod_base = OTHER; note = uridine-3'-phosphate
  modified_base 6: mod_base = OTHER; note = guanosine-3'-phosphate
  modified_base 7: mod_base = OTHER; note = adenosine-3'-phosphate
  modified_base 8: mod_base = OTHER; note = guanosine-3'-phosphate
  modified_base 9: mod_base = OTHER; note = guanosine-3'-phosphate
  modified_base 10: mod_base = OTHER; note = adenosine-3'-phosphate
  modified_base 11: mod_base = OTHER; note = guanosine-3'-phosphate
  modified_base 12: mod_base = OTHER; note = guanosine-3'-phosphate
  modified_base 13: mod_base = OTHER; note = cytidine-3'-phosphate
  modified_base 14: mod_base = OTHER; note = adenosine-3'-phosphate
  modified_base 15: mod_base = OTHER; note = guanosine-3'-phosphate
  modified_base 16: mod_base = OTHER; note = adenosine-3'-phosphate
  modified_base 17: mod_base = OTHER; note = adenosine-3'-phosphate
  modified_base 18: mod_base = OTHER; note = guanosine-3'-phosphate
  modified_base 19: mod_base = OTHER; note = uridine-3'-phosphate
  misc_feature 1..19: note = RNA
  misc_feature 20..21: note = DNA
gcactgaggaggcagaagttt

SEQ ID NO: 865 - DNA, 21 bp, synthetic construct
  source 1..21: mol_type = other DNA
  modified_base 1: mod_base = OTHER; note = guanosine-3'-phosphate
  modified_base 2: mod_base = OTHER; note = guanosine-3'-phosphate
  modified_base 3: mod_base = OTHER; note = adenosine-3'-phosphate
  modified_base 4: mod_base = OTHER; note = guanosine-3'-phosphate
  modified_base 5: mod_base = OTHER; note = guanosine-3'-phosphate
  modified_base 6: mod_base = OTHER; note = cytidine-3'-phosphate
  modified_base 7: mod_base = OTHER; note = adenosine-3'-phosphate
  modified_base 8: mod_base = OTHER; note = guanosine-3'-phosphate
  modified_base 9: mod_base = OTHER; note = adenosine-3'-phosphate
  modified_base 10: mod_base = OTHER; note = adenosine-3'-phosphate
  modified_base 11: mod_base = OTHER; note = guanosine-3'-phosphate
  modified_base 12: mod_base = OTHER; note = uridine-3'-phosphate
  modified_base 13: mod_base = OTHER; note = adenosine-3'-phosphate
  modified_base 14: mod_base = OTHER; note = uridine-3'-phosphate
  modified_base 15: mod_base = OTHER; note = guanosine-3'-phosphate
  modified_base 16: mod_base = OTHER; note = adenosine-3'-phosphate
  modified_base 17: mod_base = OTHER; note = uridine-3'-phosphate
  modified_base 18: mod_base = OTHER; note = uridine-3'-phosphate
  modified_base 19: mod_base = OTHER; note = uridine-3'-phosphate
  misc_feature 1..19: note = RNA
  misc_feature 20..21: note = DNA
ggaggcagaagtatgattttt

SEQ ID NO: 866 - DNA, 21 bp, synthetic construct
  source 1..21: mol_type = other DNA
  modified_base 1: mod_base = OTHER; note = adenosine-3'-phosphate
  modified_base 2: mod_base = OTHER; note = uridine-3'-phosphate
  modified_base 3: mod_base = OTHER; note = guanosine-3'-phosphate
  modified_base 4: mod_base = OTHER; note = adenosine-3'-phosphate
  modified_base 5: mod_base = OTHER; note = uridine-3'-phosphate
  modified_base 6: mod_base = OTHER; note = uridine-3'-phosphate
  modified_base 7: mod_base = OTHER; note = uridine-3'-phosphate
  modified_base 8: mod_base = OTHER; note = guanosine-3'-phosphate
  modified_base 9: mod_base = OTHER; note = cytidine-3'-phosphate
  modified_base 10: mod_base = OTHER; note = cytidine-3'-phosphate
  modified_base 11: mod_base = OTHER; note = guanosine-3'-phosphate
  modified_base 12: mod_base = OTHER; note = uridine-3'-phosphate
  modified_base 13: mod_base = OTHER; note = guanosine-3'-phosphate
  modified_base 14: mod_base = OTHER; note = cytidine-3'-phosphate
  modified_base 15: mod_base = OTHER; note = adenosine-3'-phosphate
  modified_base 16: mod_base = OTHER; note = cytidine-3'-phosphate
  modified_base 17: mod_base = OTHER; note = cytidine-3'-phosphate
  modified_base 18: mod_base = OTHER; note = cytidine-3'-phosphate
  modified_base 19: mod_base = OTHER; note = adenosine-3'-phosphate
  misc_feature 1..19: note = RNA
  misc_feature 20..21: note = DNA
atgatttgccgtgcacccatt

SEQ ID NO: 867 - DNA, 21 bp, synthetic construct
  source 1..21: mol_type = other DNA
  modified_base 1: mod_base = OTHER; note = uridine-3'-phosphate
  modified_base 2: mod_base = OTHER; note = guanosine-3'-phosphate
  modified_base 3: mod_base = OTHER; note = cytidine-3'-phosphate
  modified_base 4: mod_base = OTHER; note = adenosine-3'-phosphate
  modified_base 5: mod_base = OTHER; note = cytidine-3'-phosphate
  modified_base 6: mod_base = OTHER; note = cytidine-3'-phosphate
  modified_base 7: mod_base = OTHER; note = cytidine-3'-phosphate
  modified_base 8: mod_base = OTHER; note = adenosine-3'-phosphate
  modified_base 9: mod_base = OTHER; note = guanosine-3'-phosphate
  modified_base 10: mod_base = OTHER; note = guanosine-3'-phosphate
  modified_base 11: mod_base = OTHER; note = guanosine-3'-phosphate
  modified_base 12: mod_base = OTHER; note = cytidine-3'-phosphate
  modified_base 13: mod_base = OTHER; note = cytidine-3'-phosphate
  modified_base 14: mod_base = OTHER; note = adenosine-3'-phosphate
  modified_base 15: mod_base = OTHER; note = guanosine-3'-phosphate
  modified_base 16: mod_base = OTHER; note = uridine-3'-phosphate
  modified_base 17: mod_base = OTHER; note = guanosine-3'-phosphate
  modified_base 18: mod_base = OTHER; note = guanosine-3'-phosphate
  modified_base 19: mod_base = OTHER; note = adenosine-3'-phosphate
  misc_feature 1..19: note = RNA
  misc_feature 20..21: note = DNA
tgcacccagggccagtggatt

SEQ ID NO: 868 - DNA, 21 bp, synthetic construct
  source 1..21: mol_type = other DNA
  modified_base 1: mod_base = OTHER; note = guanosine-3'-phosphate
  modified_base 2: mod_base = OTHER; note = cytidine-3'-phosphate
  modified_base 3: mod_base = OTHER; note = cytidine-3'-phosphate
  modified_base 4: mod_base = OTHER; note = adenosine-3'-phosphate
  modified_base 5: mod_base = OTHER; note = guanosine-3'-phosphate
  modified_base 6: mod_base = OTHER; note = uridine-3'-phosphate
  modified_base 7: mod_base = OTHER; note = guanosine-3'-phosphate
  modified_base 8: mod_base = OTHER; note = guanosine-3'-phosphate
  modified_base 9: mod_base = OTHER; note = adenosine-3'-phosphate
  modified_base 10: mod_base = OTHER; note = cytidine-3'-phosphate
  modified_base 11: mod_base = OTHER; note = guanosine-3'-phosphate
  modified_base 12: mod_base = OTHER; note = adenosine-3'-phosphate
  modified_base 13: mod_base = OTHER; note = uridine-3'-phosphate
  modified_base 14: mod_base = OTHER; note = cytidine-3'-phosphate
  modified_base 15: mod_base = OTHER; note = cytidine-3'-phosphate
  modified_base 16: mod_base = OTHER; note = adenosine-3'-phosphate
  modified_base 17: mod_base = OTHER; note = guanosine-3'-phosphate
  modified_base 18: mod_base = OTHER; note = adenosine-3'-phosphate
  modified_base 19: mod_base = OTHER; note = adenosine-3'-phosphate
  misc_feature 1..19: note = RNA
  misc_feature 20..21: note = DNA
gccagtggacgatccagaatt

SEQ ID NO: 869 - DNA, 21 bp, synthetic construct
  source 1..21: mol_type = other DNA
  modified_base 1: mod_base = OTHER; note = guanosine-3'-phosphate
  modified_base 2: mod_base = OTHER; note = guanosine-3'-phosphate
  modified_base 3: mod_base = OTHER; note = adenosine-3'-phosphate
  modified_base 4: mod_base = OTHER; note = cytidine-3'-phosphate
  modified_base 5: mod_base = OTHER; note = guanosine-3'-phosphate
  modified_base 6: mod_base = OTHER; note = adenosine-3'-phosphate
  modified_base 7: mod_base = OTHER; note = uridine-3'-phosphate
  modified_base 8: mod_base = OTHER; note = cytidine-3'-phosphate
  modified_base 9: mod_base = OTHER; note = cytidine-3'-phosphate
  modified_base 10: mod_base = OTHER; note = adenosine-3'-phosphate
  modified_base 11: mod_base = OTHER; note = guanosine-3'-phosphate
  modified_base 12: mod_base = OTHER; note = adenosine-3'-phosphate
  modified_base 13: mod_base = OTHER; note = adenosine-3'-phosphate
  modified_base 14: mod_base = OTHER; note = cytidine-3'-phosphate
  modified_base 15: mod_base = OTHER; note = adenosine-3'-phosphate
  modified_base 16: mod_base = OTHER; note = guanosine-3'-phosphate
  modified_base 17: mod_base = OTHER; note = guanosine-3'-phosphate
  modified_base 18: mod_base = OTHER; note = adenosine-3'-phosphate
  modified_base 19: mod_base = OTHER; note = guanosine-3'-phosphate
  misc_feature 1..19: note = RNA
  misc_feature 20..21: note = DNA
ggacgatccagaacaggagtt

SEQ ID NO: 870 - DNA, 21 bp, synthetic construct
  source 1..21: mol_type = other DNA
  modified_base 1: mod_base = OTHER; note = adenosine-3'-phosphate
  modified_base 2: mod_base = OTHER; note = cytidine-3'-phosphate
  modified_base 3: mod_base = OTHER; note = adenosine-3'-phosphate
  modified_base 4: mod_base = OTHER; note = guanosine-3'-phosphate
  modified_base 5: mod_base = OTHER; note = guanosine-3'-phosphate
  modified_base 6: mod_base = OTHER; note = adenosine-3'-phosphate
  modified_base 7: mod_base = OTHER; note = guanosine-3'-phosphate
  modified_base 8: mod_base = OTHER; note = guanosine-3'-phosphate
  modified_base 9: mod_base = OTHER; note = cytidine-3'-phosphate
  modified_base 10: mod_base = OTHER; note = uridine-3'-phosphate
  modified_base 11: mod_base = OTHER; note = guanosine-3'-phosphate
  modified_base 12: mod_base = OTHER; note = uridine-3'-phosphate
  modified_base 13: mod_base = OTHER; note = guanosine-3'-phosphate
  modified_base 14: mod_base = OTHER; note = uridine-3'-phosphate
  modified_base 15: mod_base = OTHER; note = guanosine-3'-phosphate
  modified_base 16: mod_base = OTHER; note = guanosine-3'-phosphate
  modified_base 17: mod_base = OTHER; note = cytidine-3'-phosphate
  modified_base 18: mod_base = OTHER; note = uridine-3'-phosphate
  modified_base 19: mod_base = OTHER; note = uridine-3'-phosphate
  misc_feature 1..19: note = RNA
  misc_feature 20..21: note = DNA
acaggaggctgtgtggctttt

SEQ ID NO: 871 - DNA, 21 bp, synthetic construct
  source 1..21: mol_type = other DNA
  modified_base 1: mod_base = OTHER; note = cytidine-3'-phosphate
  modified_base 2: mod_base = OTHER; note = uridine-3'-phosphate
  modified_base 3: mod_base = OTHER; note = guanosine-3'-phosphate
  modified_base 4: mod_base = OTHER; note = uridine-3'-phosphate
  modified_base 5: mod_base = OTHER; note = guanosine-3'-phosphate
  modified_base 6: mod_base = OTHER; note = uridine-3'-phosphate
  modified_base 7: mod_base = OTHER; note = guanosine-3'-phosphate
  modified_base 8: mod_base = OTHER; note = guanosine-3'-phosphate
  modified_base 9: mod_base = OTHER; note = cytidine-3'-phosphate
  modified_base 10: mod_base = OTHER; note = uridine-3'-phosphate
  modified_base 11: mod_base = OTHER; note = uridine-3'-phosphate
  modified_base 12: mod_base = OTHER; note = guanosine-3'-phosphate
  modified_base 13: mod_base = OTHER; note = cytidine-3'-phosphate
  modified_base 14: mod_base = OTHER; note = guanosine-3'-phosphate
  modified_base 15: mod_base = OTHER; note = cytidine-3'-phosphate
  modified_base 16: mod_base = OTHER; note = adenosine-3'-phosphate
  modified_base 17: mod_base = OTHER; note = uridine-3'-phosphate
  modified_base 18: mod_base = OTHER; note = cytidine-3'-phosphate
  modified_base 19: mod_base = OTHER; note = cytidine-3'-phosphate
  misc_feature 1..19: note = RNA
  misc_feature 20..21: note = DNA
ctgtgtggcttgcgcatcctt

SEQ ID NO: 872 - DNA, 21 bp, synthetic construct
  source 1..21: mol_type = other DNA
  modified_base 1: mod_base = OTHER; note = uridine-3'-phosphate
  modified_base 2: mod_base = OTHER; note = guanosine-3'-phosphate
  modified_base 3: mod_base = OTHER; note = cytidine-3'-phosphate
  modified_base 4: mod_base = OTHER; note = guanosine-3'-phosphate
  modified_base 5: mod_base = OTHER; note = cytidine-3'-phosphate
  modified_base 6: mod_base = OTHER; note = adenosine-3'-phosphate
  modified_base 7: mod_base = OTHER; note = uridine-3'-phosphate
  modified_base 8: mod_base = OTHER; note = cytidine-3'-phosphate
  modified_base 9: mod_base = OTHER; note = cytidine-3'-phosphate
  modified_base 10: mod_base = OTHER; note = uridine-3'-phosphate
  modified_base 11: mod_base = OTHER; note = guanosine-3'-phosphate
  modified_base 12: mod_base = OTHER; note = cytidine-3'-phosphate
  modified_base 13: mod_base = OTHER; note = adenosine-3'-phosphate
  modified_base 14: mod_base = OTHER; note = guanosine-3'-phosphate
  modified_base 15: mod_base = OTHER; note = cytidine-3'-phosphate
  modified_base 16: mod_base = OTHER; note = cytidine-3'-phosphate
  modified_base 17: mod_base = OTHER; note = cytidine-3'-phosphate
  modified_base 18: mod_base = OTHER; note = uridine-3'-phosphate
  modified_base 19: mod_base = OTHER; note = adenosine-3'-phosphate
  misc_feature 1..19: note = RNA
  misc_feature 20..21: note = DNA
tgcgcatcctgcagccctatt

SEQ ID NO: 873 - DNA, 21 bp, synthetic construct
  source 1..21: mol_type = other DNA
  modified_base 1: mod_base = OTHER; note = adenosine-3'-phosphate
  modified_base 2: mod_base = OTHER; note = guanosine-3'-phosphate
  modified_base 3: mod_base = OTHER; note = cytidine-3'-phosphate
  modified_base 4: mod_base = OTHER; note = cytidine-3'-phosphate
  modified_base 5: mod_base = OTHER; note = cytidine-3'-phosphate
  modified_base 6: mod_base = OTHER; note = uridine-3'-phosphate
  modified_base 7: mod_base = OTHER; note = adenosine-3'-phosphate
  modified_base 8: mod_base = OTHER; note = cytidine-3'-phosphate
  modified_base 9: mod_base = OTHER; note = guanosine-3'-phosphate
  modified_base 10: mod_base = OTHER; note = cytidine-3'-phosphate
  modified_base 11: mod_base = OTHER; note = cytidine-3'-phosphate
  modified_base 12: mod_base = OTHER; note = guanosine-3'-phosphate
  modified_base 13: mod_base = OTHER; note = adenosine-3'-phosphate
  modified_base 14: mod_base = OTHER; note = guanosine-3'-phosphate
  modified_base 15: mod_base = OTHER; note = adenosine-3'-phosphate
  modified_base 16: mod_base = OTHER; note = guanosine-3'-phosphate
  modified_base 17: mod_base = OTHER; note = guanosine-3'-phosphate
  modified_base 18: mod_base = OTHER; note = adenosine-3'-phosphate
  modified_base 19: mod_base = OTHER; note = uridine-3'-phosphate
  misc_feature 1..19: note = RNA
  misc_feature 20..21: note = DNA
agccctacgccgagaggattt

SEQ ID NO: 874 - DNA, 21 bp, synthetic construct
  source 1..21: mol_type = other DNA
  modified_base 1: mod_base = OTHER; note = cytidine-3'-phosphate
  modified_base 2: mod_base = OTHER; note = cytidine-3'-phosphate
  modified_base 3: mod_base = OTHER; note = guanosine-3'-phosphate
  modified_base 4: mod_base = OTHER; note = adenosine-3'-phosphate
  modified_base 5: mod_base = OTHER; note = guanosine-3'-phosphate
  modified_base 6: mod_base = OTHER; note = adenosine-3'-phosphate
  modified_base 7: mod_base = OTHER; note = guanosine-3'-phosphate
  modified_base 8: mod_base = OTHER; note = guanosine-3'-phosphate
  modified_base 9: mod_base = OTHER; note = adenosine-3'-phosphate
  modified_base 10: mod_base = OTHER; note = uridine-3'-phosphate
  modified_base 11: mod_base = OTHER; note = cytidine-3'-phosphate
  modified_base 12: mod_base = OTHER; note = cytidine-3'-phosphate
  modified_base 13: mod_base = OTHER; note = cytidine-3'-phosphate
  modified_base 14: mod_base = OTHER; note = cytidine-3'-phosphate
  modified_base 15: mod_base = OTHER; note = guanosine-3'-phosphate
  modified_base 16: mod_base = OTHER; note = uridine-3'-phosphate
  modified_base 17: mod_base = OTHER; note = guanosine-3'-phosphate
  modified_base 18: mod_base = OTHER; note = guanosine-3'-phosphate
  modified_base 19: mod_base = OTHER; note = uridine-3'-phosphate
  misc_feature 1..19: note = RNA
  misc_feature 20..21: note = DNA
ccgagaggatccccgtggttt

SEQ ID NO: 875 - DNA, 21 bp, synthetic construct
  source 1..21: mol_type = other DNA
  modified_base 1: mod_base = OTHER; note = cytidine-3'-phosphate
  modified_base 2: mod_base = OTHER; note = cytidine-3'-phosphate
  modified_base 3: mod_base = OTHER; note = guanosine-3'-phosphate
  modified_base 4: mod_base = OTHER; note = uridine-3'-phosphate
  modified_base 5: mod_base = OTHER; note = guanosine-3'-phosphate
  modified_base 6: mod_base = OTHER; note = guanosine-3'-phosphate
  modified_base 7: mod_base = OTHER; note = uridine-3'-phosphate
  modified_base 8: mod_base = OTHER; note = guanosine-3'-phosphate
  modified_base 9: mod_base = OTHER; note = guanosine-3'-phosphate
  modified_base 10: mod_base = OTHER; note = cytidine-3'-phosphate
  modified_base 11: mod_base = OTHER; note = cytidine-3'-phosphate
  modified_base 12: mod_base = OTHER; note = adenosine-3'-phosphate
  modified_base 13: mod_base = OTHER; note = cytidine-3'-phosphate
  modified_base 14: mod_base = OTHER; note = guanosine-3'-phosphate
  modified_base 15: mod_base = OTHER; note = guanosine-3'-phosphate
  modified_base 16: mod_base = OTHER; note = cytidine-3'-phosphate
  modified_base 17: mod_base = OTHER; note = cytidine-3'-phosphate
  modified_base 18: mod_base = OTHER; note = guanosine-3'-phosphate
  modified_base 19: mod_base = OTHER; note = guanosine-3'-phosphate
  misc_feature 1..19: note = RNA
  misc_feature 20..21: note = DNA
ccgtggtggccacggccggtt

SEQ ID NO: 876 - DNA, 21 bp, synthetic construct
  source 1..21: mol_type = other DNA
  modified_base 1: mod_base = OTHER; note = cytidine-3'-phosphate
  modified_base 2: mod_base = OTHER; note = cytidine-3'-phosphate
  modified_base 3: mod_base = OTHER; note = adenosine-3'-phosphate
  modified_base 4: mod_base = OTHER; note = cytidine-3'-phosphate
  modified_base 5: mod_base = OTHER; note = guanosine-3'-phosphate
  modified_base 6: mod_base = OTHER; note = guanosine-3'-phosphate
  modified_base 7: mod_base = OTHER; note = cytidine-3'-phosphate
  modified_base 8: mod_base = OTHER; note = cytidine-3'-phosphate
  modified_base 9: mod_base = OTHER; note = guanosine-3'-phosphate
  modified_base 10: mod_base = OTHER; note = guanosine-3'-phosphate
  modified_base 11: mod_base = OTHER; note = guanosine-3'-phosphate
  modified_base 12: mod_base = OTHER; note = adenosine-3'-phosphate
  modified_base 13: mod_base = OTHER; note = uridine-3'-phosphate
  modified_base 14: mod_base = OTHER; note = cytidine-3'-phosphate
  modified_base 15: mod_base = OTHER; note = adenosine-3'-phosphate
  modified_base 16: mod_base = OTHER; note = cytidine-3'-phosphate
  modified_base 17: mod_base = OTHER; note = cytidine-3'-phosphate
  modified_base 18: mod_base = OTHER; note = adenosine-3'-phosphate
  modified_base 19: mod_base = OTHER; note = uridine-3'-phosphate
  misc_feature 1..19: note = RNA
  misc_feature 20..21: note = DNA
ccacggccgggatcaccattt

SEQ ID NO: 877 - DNA, 21 bp, synthetic construct
  source 1..21: mol_type = other DNA
  modified_base 1: mod_base = OTHER; note = guanosine-3'-phosphate
  modified_base 2: mod_base = OTHER; note = guanosine-3'-phosphate
  modified_base 3: mod_base = OTHER; note = adenosine-3'-phosphate
  modified_base 4: mod_base = OTHER; note = uridine-3'-phosphate
  modified_base 5: mod_base = OTHER; note = cytidine-3'-phosphate
  modified_base 6: mod_base = OTHER; note = adenosine-3'-phosphate
  modified_base 7: mod_base = OTHER; note = cytidine-3'-phosphate
  modified_base 8: mod_base = OTHER; note = cytidine-3'-phosphate
  modified_base 9: mod_base = OTHER; note = adenosine-3'-phosphate
  modified_base 10: mod_base = OTHER; note = uridine-3'-phosphate
  modified_base 11: mod_base = OTHER; note = cytidine-3'-phosphate
  modified_base 12: mod_base = OTHER; note = adenosine-3'-phosphate
  modified_base 13: mod_base = OTHER; note = adenosine-3'-phosphate
  modified_base 14: mod_base = OTHER; note = cytidine-3'-phosphate
  modified_base 15: mod_base = OTHER; note = uridine-3'-phosphate
  modified_base 16: mod_base = OTHER; note = uridine-3'-phosphate
  modified_base 17: mod_base = OTHER; note = cytidine-3'-phosphate
  modified_base 18: mod_base = OTHER; note = adenosine-3'-phosphate
  modified_base 19: mod_base = OTHER; note = cytidine-3'-phosphate
  misc_feature 1..19: note = RNA
  misc_feature 20..21: note = DNA
ggatcaccatcaacttcactt

SEQ ID NO: 878 - DNA, 21 bp, synthetic construct
  source 1..21: mol_type = other DNA
  modified_base 1: mod_base = OTHER; note = uridine-3'-phosphate
  modified_base 2: mod_base = OTHER; note = cytidine-3'-phosphate
  modified_base 3: mod_base = OTHER; note = adenosine-3'-phosphate
  modified_base 4: mod_base = OTHER; note = adenosine-3'-phosphate
  modified_base 5: mod_base = OTHER; note = cytidine-3'-phosphate
  modified_base 6: mod_base = OTHER; note = uridine-3'-phosphate
  modified_base 7: mod_base = OTHER; note = uridine-3'-phosphate
  modified_base 8: mod_base = OTHER; note = cytidine-3'-phosphate
  modified_base 9: mod_base = OTHER; note = adenosine-3'-phosphate
  modified_base 10: mod_base = OTHER; note = cytidine-3'-phosphate
  modified_base 11: mod_base = OTHER; note = cytidine-3'-phosphate
  modified_base 12: mod_base = OTHER; note = uridine-3'-phosphate
  modified_base 13: mod_base = OTHER; note = cytidine-3'-phosphate
  modified_base 14: mod_base = OTHER; note = cytidine-3'-phosphate
  modified_base 15: mod_base = OTHER; note = cytidine-3'-phosphate
  modified_base 16: mod_base = OTHER; note = adenosine-3'-phosphate
  modified_base 17: mod_base = OTHER; note = guanosine-3'-phosphate
  modified_base 18: mod_base = OTHER; note = adenosine-3'-phosphate
  modified_base 19: mod_base = OTHER; note = uridine-3'-phosphate
  misc_feature 1..19: note = RNA
  misc_feature 20..21: note = DNA
tcaacttcacctcccagattt

SEQ ID NO: 879 - DNA, 21 bp, synthetic construct
  source 1..21: mol_type = other DNA
  modified_base 1: mod_base = OTHER; note = cytidine-3'-phosphate
  modified_base 2: mod_base = OTHER; note = cytidine-3'-phosphate
  modified_base 3: mod_base = OTHER; note = cytidine-3'-phosphate
  modified_base 4: mod_base = OTHER; note = adenosine-3'-phosphate
  modified_base 5: mod_base = OTHER; note = guanosine-3'-phosphate
  modified_base 6: mod_base = OTHER; note = adenosine-3'-phosphate
  modified_base 7: mod_base = OTHER; note = uridine-3'-phosphate
  modified_base 8: mod_base = OTHER; note = cytidine-3'-phosphate
  modified_base 9: mod_base = OTHER; note = uridine-3'-phosphate
  modified_base 10: mod_base = OTHER; note = cytidine-3'-phosphate
  modified_base 11: mod_base = OTHER; note = cytidine-3'-phosphate
  modified_base 12: mod_base = OTHER; note = cytidine-3'-phosphate
  modified_base 13: mod_base = OTHER; note = uridine-3'-phosphate
  modified_base 14: mod_base = OTHER; note = cytidine-3'-phosphate
  modified_base 15: mod_base = OTHER; note = adenosine-3'-phosphate
  modified_base 16: mod_base = OTHER; note = cytidine-3'-phosphate
  modified_base 17: mod_base = OTHER; note = cytidine-3'-phosphate
  modified_base 18: mod_base = OTHER; note = guanosine-3'-phosphate
  modified_base 19: mod_base = OTHER; note = guanosine-3'-phosphate
  misc_feature 1..19: note = RNA
  misc_feature 20..21: note = DNA
cccagatctccctcaccggtt

SEQ ID NO: 880 - DNA, 21 bp, synthetic construct
  source 1..21: mol_type = other DNA
  modified_base 1: mod_base = OTHER; note = cytidine-3'-phosphate
  modified_base 2: mod_base = OTHER; note = cytidine-3'-phosphate
  modified_base 3: mod_base = OTHER; note = cytidine-3'-phosphate
  modified_base 4: mod_base = OTHER; note = uridine-3'-phosphate
  modified_base 5: mod_base = OTHER; note = cytidine-3'-phosphate
  modified_base 6: mod_base = OTHER; note = adenosine-3'-phosphate
  modified_base 7: mod_base = OTHER; note = cytidine-3'-phosphate
  modified_base 8: mod_base = OTHER; note = cytidine-3'-phosphate
  modified_base 9: mod_base = OTHER; note = guanosine-3'-phosphate
  modified_base 10: mod_base = OTHER; note = guanosine-3'-phosphate
  modified_base 11: mod_base = OTHER; note = guanosine-3'-phosphate
  modified_base 12: mod_base = OTHER; note = cytidine-3'-phosphate
  modified_base 13: mod_base = OTHER; note = cytidine-3'-phosphate
  modified_base 14: mod_base = OTHER; note = cytidine-3'-phosphate
  modified_base 15: mod_base = OTHER; note = guanosine-3'-phosphate
  modified_base 16: mod_base = OTHER; note = guanosine-3'-phosphate
  modified_base 17: mod_base = OTHER; note = uridine-3'-phosphate
  modified_base 18: mod_base = OTHER; note = guanosine-3'-phosphate
  modified_base 19: mod_base = OTHER; note = uridine-3'-phosphate
  misc_feature 1..19: note = RNA
  misc_feature 20..21: note = DNA
ccctcaccgggcccggtgttt

SEQ ID NO: 881 - DNA, 21 bp, synthetic construct
  source 1..21: mol_type = other DNA
  modified_base 1: mod_base = OTHER; note = cytidine-3'-phosphate
  modified_base 2: mod_base = OTHER; note = cytidine-3'-phosphate
  modified_base 3: mod_base = OTHER; note = cytidine-3'-phosphate
  modified_base 4: mod_base = OTHER; note = guanosine-3'-phosphate
  modified_base 5: mod_base = OTHER; note = guanosine-3'-phosphate
  modified_base 6: mod_base = OTHER; note = uridine-3'-phosphate
  modified_base 7: mod_base = OTHER; note = guanosine-3'-phosphate
  modified_base 8: mod_base = OTHER; note = uridine-3'-phosphate
  modified_base 9: mod_base = OTHER; note = guanosine-3'-phosphate
  modified_base 10: mod_base = OTHER; note = cytidine-3'-phosphate
  modified_base 11: mod_base = OTHER; note = guanosine-3'-phosphate
  modified_base 12: mod_base = OTHER; note = guanosine-3'-phosphate
  modified_base 13: mod_base = OTHER; note = guanosine-3'-phosphate
  modified_base 14: mod_base = OTHER; note = uridine-3'-phosphate
  modified_base 15: mod_base = OTHER; note = guanosine-3'-phosphate
  modified_base 16: mod_base = OTHER; note = cytidine-3'-phosphate
  modified_base 17: mod_base = OTHER; note = adenosine-3'-phosphate
  modified_base 18: mod_base = OTHER; note = cytidine-3'-phosphate
  modified_base 19: mod_base = OTHER; note = uridine-3'-phosphate
  misc_feature 1..19: note = RNA
  misc_feature 20..21: note = DNA
cccggtgtgcgggtgcacttt

SEQ ID NO: 882 - DNA, 21 bp, synthetic construct
  source 1..21: mol_type = other DNA
  modified_base 1: mod_base = OTHER; note = guanosine-3'-phosphate
  modified_base 2: mod_base = OTHER; note = cytidine-3'-phosphate
  modified_base 3: mod_base = OTHER; note = uridine-3'-phosphate
  modified_base 4: mod_base = OTHER; note = uridine-3'-phosphate
  modified_base 5: mod_base = OTHER; note = guanosine-3'-phosphate
  modified_base 6: mod_base = OTHER; note = uridine-3'-phosphate
  modified_base 7: mod_base = OTHER; note = adenosine-3'-phosphate
  modified_base 8: mod_base = OTHER; note = cytidine-3'-phosphate
  modified_base 9: mod_base = OTHER; note = adenosine-3'-phosphate
  modified_base 10: mod_base = OTHER; note = adenosine-3'-phosphate
  modified_base 11: mod_base = OTHER; note = cytidine-3'-phosphate
  modified_base 12: mod_base = OTHER; note = cytidine-3'-phosphate
  modified_base 13: mod_base = OTHER; note = adenosine-3'-phosphate
  modified_base 14: mod_base = OTHER; note = guanosine-3'-phosphate
  modified_base 15: mod_base = OTHER; note = uridine-3'-phosphate
  modified_base 16: mod_base = OTHER; note = cytidine-3'-phosphate
  modified_base 17: mod_base = OTHER; note = guanosine-3'-phosphate
  modified_base 18: mod_base = OTHER; note = guanosine-3'-phosphate
  modified_base 19: mod_base = OTHER; note = adenosine-3'-phosphate
  misc_feature 1..19: note = RNA
  misc_feature 20..21: note = DNA
gcttgtacaaccagtcggatt

SEQ ID NO: 883 - DNA, 21 bp, synthetic construct
  source 1..21: mol_type = other DNA
  modified_base 1: mod_base = OTHER; note = adenosine-3'-phosphate
  modified_base 2: mod_base = OTHER; note = cytidine-3'-phosphate
  modified_base 3: mod_base = OTHER; note = adenosine-3'-phosphate
  modified_base 4: mod_base = OTHER; note = adenosine-3'-phosphate
  modified_base 5: mod_base = OTHER; note = cytidine-3'-phosphate
  modified_base 6: mod_base = OTHER; note = cytidine-3'-phosphate
  modified_base 7: mod_base = OTHER; note = adenosine-3'-phosphate
  modified_base 8: mod_base = OTHER; note = guanosine-3'-phosphate
  modified_base 9: mod_base = OTHER; note = uridine-3'-phosphate
  modified_base 10: mod_base = OTHER; note = cytidine-3'-phosphate
  modified_base 11: mod_base = OTHER; note = guanosine-3'-phosphate
  modified_base 12: mod_base = OTHER; note = guanosine-3'-phosphate
  modified_base 13: mod_base = OTHER; note = adenosine-3'-phosphate
  modified_base 14: mod_base = OTHER; note = cytidine-3'-phosphate
  modified_base 15: mod_base = OTHER; note = cytidine-3'-phosphate
  modified_base 16: mod_base = OTHER; note = cytidine-3'-phosphate
  modified_base 17: mod_base = OTHER; note = cytidine-3'-phosphate
  modified_base 18: mod_base = OTHER; note = uridine-3'-phosphate
  modified_base 19: mod_base = OTHER; note = guanosine-3'-phosphate
  misc_feature 1..19: note = RNA
  misc_feature 20..21: note = DNA
acaaccagtcggacccctgtt

SEQ ID NO: 884 - DNA, 21 bp, synthetic construct
  source 1..21: mol_type = other DNA
  modified_base 1: mod_base = OTHER; note = adenosine-3'-phosphate
  modified_base 2: mod_base = OTHER; note = cytidine-3'-phosphate
  modified_base 3: mod_base = OTHER; note = cytidine-3'-phosphate
  modified_base 4: mod_base = OTHER; note = cytidine-3'-phosphate
  modified_base 5: mod_base = OTHER; note = cytidine-3'-phosphate
  modified_base 6: mod_base = OTHER; note = uridine-3'-phosphate
  modified_base 7: mod_base = OTHER; note = guanosine-3'-phosphate
  modified_base 8: mod_base = OTHER; note = cytidine-3'-phosphate
  modified_base 9: mod_base = OTHER; note = cytidine-3'-phosphate
  modified_base 10: mod_base = OTHER; note = cytidine-3'-phosphate
  modified_base 11: mod_base = OTHER; note = uridine-3'-phosphate
  modified_base 12: mod_base = OTHER; note = guanosine-3'-phosphate
  modified_base 13: mod_base = OTHER; note = guanosine-3'-phosphate
  modified_base 14: mod_base = OTHER; note = adenosine-3'-phosphate
  modified_base 15: mod_base = OTHER; note = guanosine-3'-phosphate
  modified_base 16: mod_base = OTHER; note = adenosine-3'-phosphate
  modified_base 17: mod_base = OTHER; note = guanosine-3'-phosphate
  modified_base 18: mod_base = OTHER; note = uridine-3'-phosphate
  modified_base 19: mod_base = OTHER; note = uridine-3'-phosphate
  misc_feature 1..19: note = RNA
  misc_feature 20..21: note = DNA
acccctgccctggagagtttt

SEQ ID NO: 885 - DNA, 21 bp, synthetic construct
  source 1..21: mol_type = other DNA
  modified_base 1: mod_base = OTHER; note = cytidine-3'-phosphate
  modified_base 2: mod_base = OTHER; note = cytidine-3'-phosphate
  modified_base 3: mod_base = OTHER; note = uridine-3'-phosphate
  modified_base 4: mod_base = OTHER; note = guanosine-3'-phosphate
  modified_base 5: mod_base = OTHER; note = guanosine-3'-phosphate
  modified_base 6: mod_base = OTHER; note = adenosine-3'-phosphate
  modified_base 7: mod_base = OTHER; note = guanosine-3'-phosphate
  modified_base 8: mod_base = OTHER; note = adenosine-3'-phosphate
  modified_base 9: mod_base = OTHER; note = guanosine-3'-phosphate
  modified_base 10: mod_base = OTHER; note = uridine-3'-phosphate
  modified_base 11: mod_base = OTHER; note = uridine-3'-phosphate
  modified_base 12: mod_base = OTHER; note = cytidine-3'-phosphate
  modified_base 13: mod_base = OTHER; note = cytidine-3'-phosphate
  modified_base 14: mod_base = OTHER; note = uridine-3'-phosphate
  modified_base 15: mod_base = OTHER; note = cytidine-3'-phosphate
  modified_base 16: mod_base = OTHER; note = uridine-3'-phosphate
  modified_base 17: mod_base = OTHER; note = guanosine-3'-phosphate
  modified_base 18: mod_base = OTHER; note = uridine-3'-phosphate
  modified_base 19: mod_base = OTHER; note = uridine-3'-phosphate
  misc_feature 1..19: note = RNA
  misc_feature 20..21: note = DNA
cctggagagttcctctgtttt

SEQ ID NO: 886 - DNA, 21 bp, synthetic construct
  source 1..21: mol_type = other DNA
  modified_base 1: mod_base = OTHER; note = uridine-3'-phosphate
  modified_base 2: mod_base = OTHER; note = cytidine-3'-phosphate
  modified_base 3: mod_base = OTHER; note = uridine-3'-phosphate
  modified_base 4: mod_base = OTHER; note = guanosine-3'-phosphate
  modified_base 5: mod_base = OTHER; note = uridine-3'-phosphate
  modified_base 6: mod_base = OTHER; note = uridine-3'-phosphate
  modified_base 7: mod_base = OTHER; note = cytidine-3'-phosphate
  modified_base 8: mod_base = OTHER; note = uridine-3'-phosphate
  modified_base 9: mod_base = OTHER; note = guanosine-3'-phosphate
  modified_base 10: mod_base = OTHER; note = uridine-3'-phosphate
  modified_base 11: mod_base = OTHER; note = guanosine-3'-phosphate
  modified_base 12: mod_base = OTHER; note = adenosine-3'-phosphate
  modified_base 13: mod_base = OTHER; note = adenosine-3'-phosphate
  modified_base 14: mod_base = OTHER; note = uridine-3'-phosphate
  modified_base 15: mod_base = OTHER; note = guanosine-3'-phosphate
  modified_base 16: mod_base = OTHER; note = guanosine-3'-phosphate
  modified_base 17: mod_base = OTHER; note = adenosine-3'-phosphate
  modified_base 18: mod_base = OTHER; note = cytidine-3'-phosphate
  modified_base 19: mod_base = OTHER; note = uridine-3'-phosphate
  misc_feature 1..19: note = RNA
  misc_feature 20..21: note = DNA
tctgttctgtgaatggacttt

SEQ ID NO: 887 - DNA, 21 bp, synthetic construct
  source 1..21: mol_type = other DNA
  modified_base 1: mod_base = OTHER; note = guanosine-3'-phosphate
  modified_base 2: mod_base = OTHER; note = adenosine-3'-phosphate
  modified_base 3: mod_base = OTHER; note = adenosine-3'-phosphate
  modified_base 4: mod_base = OTHER; note = uridine-3'-phosphate
  modified_base 5: mod_base = OTHER; note = guanosine-3'-phosphate
  modified_base 6: mod_base = OTHER; note = guanosine-3'-phosphate
  modified_base 7: mod_base = OTHER; note = adenosine-3'-phosphate
  modified_base 8: mod_base = OTHER; note = cytidine-3'-phosphate
  modified_base 9: mod_base = OTHER; note = uridine-3'-phosphate
  modified_base 10: mod_base = OTHER; note = cytidine-3'-phosphate
  modified_base 11: mod_base = OTHER; note = uridine-3'-phosphate
  modified_base 12: mod_base = OTHER; note = guanosine-3'-phosphate
  modified_base 13: mod_base = OTHER; note = uridine-3'-phosphate
  modified_base 14: mod_base = OTHER; note = guanosine-3'-phosphate
  modified_base 15: mod_base = OTHER; note = uridine-3'-phosphate
  modified_base 16: mod_base = OTHER; note = cytidine-3'-phosphate
  modified_base 17: mod_base = OTHER; note = cytidine-3'-phosphate
  modified_base 18: mod_base = OTHER; note = cytidine-3'-phosphate
  modified_base 19: mod_base = OTHER; note = uridine-3'-phosphate
  misc_feature 1..19: note = RNA
  misc_feature 20..21: note = DNA
gaatggactctgtgtcccttt

SEQ ID NO: 888 - DNA, 21 bp, synthetic construct
  source 1..21: mol_type = other DNA
  modified_base 1: mod_base = OTHER; note = cytidine-3'-phosphate
  modified_base 2: mod_base = OTHER; note = uridine-3'-phosphate
  modified_base 3: mod_base = OTHER; note = guanosine-3'-phosphate
  modified_base 4: mod_base = OTHER; note = uridine-3'-phosphate
  modified_base 5: mod_base = OTHER; note = guanosine-3'-phosphate
  modified_base 6: mod_base = OTHER; note = uridine-3'-phosphate
  modified_base 7: mod_base = OTHER; note = cytidine-3'-phosphate
  modified_base 8: mod_base = OTHER; note = cytidine-3'-phosphate
  modified_base 9: mod_base = OTHER; note = cytidine-3'-phosphate
  modified_base 10: mod_base = OTHER; note = uridine-3'-phosphate
  modified_base 11: mod_base = OTHER; note = guanosine-3'-phosphate
  modified_base 12: mod_base = OTHER; note = cytidine-3'-phosphate
  modified_base 13: mod_base = OTHER; note = cytidine-3'-phosphate
  modified_base 14: mod_base = OTHER; note = uridine-3'-phosphate
  modified_base 15: mod_base = OTHER; note = guanosine-3'-phosphate
  modified_base 16: mod_base = OTHER; note = uridine-3'-phosphate
  modified_base 17: mod_base = OTHER; note = guanosine-3'-phosphate
  modified_base 18: mod_base = OTHER; note = adenosine-3'-phosphate
  modified_base 19: mod_base = OTHER; note = uridine-3'-phosphate
  misc_feature 1..19: note = RNA
  misc_feature 20..21: note = DNA
ctgtgtccctgcctgtgattt

SEQ ID NO: 889 - DNA, 21 bp, synthetic construct
  source 1..21: mol_type = other DNA
  modified_base 1: mod_base = OTHER; note = cytidine-3'-phosphate
  modified_base 2: mod_base = OTHER; note = uridine-3'-phosphate
  modified_base 3: mod_base = OTHER; note = guanosine-3'-phosphate
  modified_base 4: mod_base = OTHER; note = cytidine-3'-phosphate
  modified_base 5: mod_base = OTHER; note = cytidine-3'-phosphate
  modified_base 6: mod_base = OTHER; note = uridine-3'-phosphate
  modified_base 7: mod_base = OTHER; note = guanosine-3'-phosphate
  modified_base 8: mod_base = OTHER; note = uridine-3'-phosphate
  modified_base 9: mod_base = OTHER; note = guanosine-3'-phosphate
  modified_base 10: mod_base = OTHER; note = adenosine-3'-phosphate
  modified_base 11: mod_base = OTHER; note = uridine-3'-phosphate
  modified_base 12: mod_base = OTHER; note = guanosine-3'-phosphate
  modified_base 13: mod_base = OTHER; note = guanosine-3'-phosphate
  modified_base 14: mod_base = OTHER; note = guanosine-3'-phosphate
  modified_base 15: mod_base = OTHER; note = guanosine-3'-phosphate
  modified_base 16: mod_base = OTHER; note = uridine-3'-phosphate
  modified_base 17: mod_base = OTHER; note = cytidine-3'-phosphate
  modified_base 18: mod_base = OTHER; note = adenosine-3'-phosphate
  modified_base 19: mod_base = OTHER; note = adenosine-3'-phosphate
  misc_feature 1..19: note = RNA
  misc_feature 20..21: note = DNA
ctgcctgtgatggggtcaatt

SEQ ID NO: 890 - DNA, 21 bp, synthetic construct
  source 1..21: mol_type = other DNA
  modified_base 1: mod_base = OTHER; note = guanosine-3'-phosphate
  modified_base 2: mod_base = OTHER; note = guanosine-3'-phosphate
  modified_base 3: mod_base = OTHER; note = uridine-3'-phosphate
  modified_base 4: mod_base = OTHER; note = cytidine-3'-phosphate
  modified_base 5: mod_base = OTHER; note = adenosine-3'-phosphate
  modified_base 6: mod_base = OTHER; note = adenosine-3'-phosphate
  modified_base 7: mod_base = OTHER; note = guanosine-3'-phosphate
  modified_base 8: mod_base = OTHER; note = guanosine-3'-phosphate
  modified_base 9: mod_base = OTHER; note = adenosine-3'-phosphate
  modified_base 10: mod_base = OTHER; note = cytidine-3'-phosphate
  modified_base 11: mod_base = OTHER; note = uridine-3'-phosphate
  modified_base 12: mod_base = OTHER; note = guanosine-3'-phosphate
  modified_base 13: mod_base = OTHER; note = cytidine-3'-phosphate
  modified_base 14: mod_base = OTHER; note = cytidine-3'-phosphate
  modified_base 15: mod_base = OTHER; note = cytidine-3'-phosphate
  modified_base 16: mod_base = OTHER; note = cytidine-3'-phosphate
  modified_base 17: mod_base = OTHER; note = adenosine-3'-phosphate
  modified_base 18: mod_base = OTHER; note = adenosine-3'-phosphate
  modified_base 19: mod_base = OTHER; note = cytidine-3'-phosphate
  misc_feature 1..19: note = RNA
  misc_feature 20..21: note = DNA
ggtcaaggactgccccaactt

SEQ ID NO: 891 - DNA, 21 bp, synthetic construct
  source 1..21: mol_type = other DNA
  modified_base 1: mod_base = OTHER; note = uridine-3'-phosphate
  modified_base 2: mod_base = OTHER; note = guanosine-3'-phosphate
  modified_base 3: mod_base = OTHER; note = cytidine-3'-phosphate
  modified_base 4: mod_base = OTHER; note = cytidine-3'-phosphate
  modified_base 5: mod_base = OTHER; note = cytidine-3'-phosphate
  modified_base 6: mod_base = OTHER; note = cytidine-3'-phosphate
  modified_base 7: mod_base = OTHER; note = adenosine-3'-phosphate
  modified_base 8: mod_base = OTHER; note = adenosine-3'-phosphate
  modified_base 9: mod_base = OTHER; note = cytidine-3'-phosphate
  modified_base 10: mod_base = OTHER; note = guanosine-3'-phosphate
  modified_base 11: mod_base = OTHER; note = guanosine-3'-phosphate
  modified_base 12: mod_base = OTHER; note = cytidine-3'-phosphate
  modified_base 13: mod_base = OTHER; note = cytidine-3'-phosphate
  modified_base 14: mod_base = OTHER; note = uridine-3'-phosphate
  modified_base 15: mod_base = OTHER; note = guanosine-3'-phosphate
  modified_base 16: mod_base = OTHER; note = guanosine-3'-phosphate
  modified_base 17: mod_base = OTHER; note = adenosine-3'-phosphate
  modified_base 18: mod_base = OTHER; note = uridine-3'-phosphate
  modified_base 19: mod_base = OTHER; note = guanosine-3'-phosphate
  misc_feature 1..19: note = RNA
  misc_feature 20..21: note = DNA
tgccccaacggcctggatgtt

SEQ ID NO: 892 - DNA, 21 bp, synthetic construct
  source 1..21: mol_type = other DNA
  modified_base 1: mod_base = OTHER; note = cytidine-3'-phosphate
  modified_base 2: mod_base = OTHER; note = guanosine-3'-phosphate
  modified_base 3: mod_base = OTHER; note = guanosine-3'-phosphate
  modified_base 4: mod_base = OTHER; note = cytidine-3'-phosphate
  modified_base 5: mod_base = OTHER; note = cytidine-3'-phosphate
  modified_base 6: mod_base = OTHER; note = uridine-3'-phosphate
  modified_base 7: mod_base = OTHER; note = guanosine-3'-phosphate
  modified_base 8: mod_base = OTHER; note = guanosine-3'-phosphate
  modified_base 9: mod_base = OTHER; note = adenosine-3'-phosphate
  modified_base 10: mod_base = OTHER; note = uridine-3'-phosphate
  modified_base 11: mod_base = OTHER; note = guanosine-3'-phosphate
  modified_base 12: mod_base = OTHER; note = adenosine-3'-phosphate
  modified_base 13: mod_base = OTHER; note = guanosine-3'-phosphate
  modified_base 14: mod_base = OTHER; note = adenosine-3'-phosphate
  modified_base 15: mod_base = OTHER; note = guanosine-3'-phosphate
  modified_base 16: mod_base = OTHER; note = adenosine-3'-phosphate
  modified_base 17: mod_base = OTHER; note = adenosine-3'-phosphate
  modified_base 18: mod_base = OTHER; note = adenosine-3'-phosphate
  modified_base 19: mod_base = OTHER; note = cytidine-3'-phosphate
  misc_feature 1..19: note = RNA
  misc_feature 20..21: note = DNA
cggcctggatgagagaaactt

SEQ ID NO: 893 - DNA, 21 bp, synthetic construct
  source 1..21: mol_type = other DNA
  modified_base 1: mod_base = OTHER; note = guanosine-3'-phosphate
  modified_base 2: mod_base = OTHER; note = adenosine-3'-phosphate
  modified_base 3: mod_base = OTHER; note = guanosine-3'-phosphate
  modified_base 4: mod_base = OTHER; note = adenosine-3'-phosphate
  modified_base 5: mod_base = OTHER; note = guanosine-3'-phosphate
  modified_base 6: mod_base = OTHER; note = adenosine-3'-phosphate
  modified_base 7: mod_base = OTHER; note = adenosine-3'-phosphate
  modified_base 8: mod_base = OTHER; note = adenosine-3'-phosphate
  modified_base 9: mod_base = OTHER; note = cytidine-3'-phosphate
  modified_base 10: mod_base = OTHER; note = uridine-3'-phosphate
  modified_base 11: mod_base = OTHER; note = guanosine-3'-phosphate
  modified_base 12: mod_base = OTHER; note = cytidine-3'-phosphate
  modified_base 13: mod_base = OTHER; note = guanosine-3'-phosphate
  modified_base 14: mod_base = OTHER; note = uridine-3'-phosphate
  modified_base 15: mod_base = OTHER; note = uridine-3'-phosphate
  modified_base 16: mod_base = OTHER; note = uridine-3'-phosphate
  modified_base 17: mod_base = OTHER; note = guanosine-3'-phosphate
  modified_base 18: mod_base = OTHER; note = cytidine-3'-phosphate
  modified_base 19: mod_base = OTHER; note = adenosine-3'-phosphate
  misc_feature 1..19: note = RNA
  misc_feature 20..21: note = DNA
gagagaaactgcgtttgcatt

SEQ ID NO: 894 - DNA, 21 bp, synthetic construct
  source 1..21: mol_type = other DNA
  modified_base 1: mod_base = OTHER; note = uridine-3'-phosphate
  modified_base 2: mod_base = OTHER; note = uridine-3'-phosphate
  modified_base 3: mod_base = OTHER; note = uridine-3'-phosphate
  modified_base 4: mod_base = OTHER; note = guanosine-3'-phosphate
  modified_base 5: mod_base = OTHER; note = cytidine-3'-phosphate
  modified_base 6: mod_base = OTHER; note = adenosine-3'-phosphate
  modified_base 7: mod_base = OTHER; note = guanosine-3'-phosphate
  modified_base 8: mod_base = OTHER; note = adenosine-3'-phosphate
  modified_base 9: mod_base = OTHER; note = guanosine-3'-phosphate
  modified_base 10: mod_base = OTHER; note = cytidine-3'-phosphate
  modified_base 11: mod_base = OTHER; note = cytidine-3'-phosphate
  modified_base 12: mod_base = OTHER; note = adenosine-3'-phosphate
  modified_base 13: mod_base = OTHER; note = cytidine-3'-phosphate
  modified_base 14: mod_base = OTHER; note = adenosine-3'-phosphate
  modified_base 15: mod_base = OTHER; note = uridine-3'-phosphate
  modified_base 16: mod_base = OTHER; note = uridine-3'-phosphate
  modified_base 17: mod_base = OTHER; note = cytidine-3'-phosphate
  modified_base 18: mod_base = OTHER; note = cytidine-3'-phosphate
  modified_base 19: mod_base = OTHER; note = adenosine-3'-phosphate
  misc_feature 1..19: note = RNA
  misc_feature 20..21: note = DNA
tttgcagagccacattccatt

SEQ ID NO: 895 - DNA, 21 bp, synthetic construct
  source 1..21: mol_type = other DNA
  modified_base 1: mod_base = OTHER; note = guanosine-3'-phosphate
  modified_base 2: mod_base = OTHER; note = cytidine-3'-phosphate
  modified_base 3: mod_base = OTHER; note = cytidine-3'-phosphate
  modified_base 4: mod_base = OTHER; note = adenosine-3'-phosphate
  modified_base 5: mod_base = OTHER; note = cytidine-3'-phosphate
  modified_base 6: mod_base = OTHER; note = adenosine-3'-phosphate
  modified_base 7: mod_base = OTHER; note = uridine-3'-phosphate
  modified_base 8: mod_base = OTHER; note = uridine-3'-phosphate
  modified_base 9: mod_base = OTHER; note = cytidine-3'-phosphate
  modified_base 10: mod_base = OTHER; note = cytidine-3'-phosphate
  modified_base 11: mod_base = OTHER; note = adenosine-3'-phosphate
  modified_base 12: mod_base = OTHER; note = guanosine-3'-phosphate
  modified_base 13: mod_base = OTHER; note = uridine-3'-phosphate
  modified_base 14: mod_base = OTHER; note = guanosine-3'-phosphate
  modified_base 15: mod_base = OTHER; note = cytidine-3'-phosphate
  modified_base 16: mod_base = OTHER; note = adenosine-3'-phosphate
  modified_base 17: mod_base = OTHER; note = adenosine-3'-phosphate
  modified_base 18: mod_base = OTHER; note = adenosine-3'-phosphate
  modified_base 19: mod_base = OTHER; note = guanosine-3'-phosphate
  misc_feature 1..19: note = RNA
  misc_feature 20..21: note = DNA
gccacattccagtgcaaagtt

SEQ ID NO: 896 - DNA, 21 bp, synthetic construct
  source 1..21: mol_type = other DNA
  modified_base 1: mod_base = OTHER; note = guanosine-3'-phosphate
  modified_base 2: mod_base = OTHER; note = uridine-3'-phosphate
  modified_base 3: mod_base = OTHER; note = guanosine-3'-phosphate
  modified_base 4: mod_base = OTHER; note = cytidine-3'-phosphate
  modified_base 5: mod_base = OTHER; note = adenosine-3'-phosphate
  modified_base 6: mod_base = OTHER; note = adenosine-3'-phosphate
  modified_base 7: mod_base = OTHER; note = adenosine-3'-phosphate
  modified_base 8: mod_base = OTHER; note = guanosine-3'-phosphate
  modified_base 9: mod_base = OTHER; note = adenosine-3'-phosphate
  modified_base 10: mod_base = OTHER; note = guanosine-3'-phosphate
  modified_base 11: mod_base = OTHER; note = guanosine-3'-phosphate
  modified_base 12: mod_base = OTHER; note = adenosine-3'-phosphate
  modified_base 13: mod_base = OTHER; note = cytidine-3'-phosphate
  modified_base 14: mod_base = OTHER; note = adenosine-3'-phosphate
  modified_base 15: mod_base = OTHER; note = guanosine-3'-phosphate
  modified_base 16: mod_base = OTHER; note = cytidine-3'-phosphate
  modified_base 17: mod_base = OTHER; note = adenosine-3'-phosphate
  modified_base 18: mod_base = OTHER; note = cytidine-3'-phosphate
  modified_base 19: mod_base = OTHER; note = adenosine-3'-phosphate
  misc_feature 1..19: note = RNA
  misc_feature 20..21: note = DNA
gtgcaaagaggacagcacatt

SEQ ID NO: 897 - DNA, 21 bp, synthetic construct
  source 1..21: mol_type = other DNA
  modified_base 1: mod_base = OTHER; note = guanosine-3'-phosphate
  modified_base 2: mod_base = OTHER; note = adenosine-3'-phosphate
  modified_base 3: mod_base = OTHER; note = guanosine-3'-phosphate
  modified_base 4: mod_base = OTHER; note = guanosine-3'-phosphate
  modified_base 5: mod_base = OTHER; note = adenosine-3'-phosphate
  modified_base 6: mod_base = OTHER; note = cytidine-3'-phosphate
  modified_base 7: mod_base = OTHER; note = adenosine-3'-phosphate
  modified_base 8: mod_base = OTHER; note = guanosine-3'-phosphate
  modified_base 9: mod_base = OTHER; note = cytidine-3'-phosphate
  modified_base 10: mod_base = OTHER; note = adenosine-3'-phosphate
  modified_base 11: mod_base = OTHER; note = cytidine-3'-phosphate
  modified_base 12: mod_base = OTHER; note = adenosine-3'-phosphate
  modified_base 13: mod_base = OTHER; note = uridine-3'-phosphate
  modified_base 14: mod_base = OTHER; note = guanosine-3'-phosphate
  modified_base 15: mod_base = OTHER; note = cytidine-3'-phosphate
  modified_base 16: mod_base = OTHER; note = adenosine-3'-phosphate
  modified_base 17: mod_base = OTHER; note = uridine-3'-phosphate
  modified_base 18: mod_base = OTHER; note = cytidine-3'-phosphate
  modified_base 19: mod_base = OTHER; note = uridine-3'-phosphate
  misc_feature 1..19: note = RNA
  misc_feature 20..21: note = DNA
gaggacagcacatgcatcttt

SEQ ID NO: 898 - DNA, 21 bp, synthetic construct
  source 1..21: mol_type = other DNA
  modified_base 1: mod_base = OTHER; note = guanosine-3'-phosphate
  modified_base 2: mod_base = OTHER; note = cytidine-3'-phosphate
  modified_base 3: mod_base = OTHER; note = adenosine-3'-phosphate
  modified_base 4: mod_base = OTHER; note = uridine-3'-phosphate
  modified_base 5: mod_base = OTHER; note = cytidine-3'-phosphate
  modified_base 6: mod_base = OTHER; note = uridine-3'-phosphate
  modified_base 7: mod_base = OTHER; note = cytidine-3'-phosphate
  modified_base 8: mod_base = OTHER; note = adenosine-3'-phosphate
  modified_base 9: mod_base = OTHER; note = cytidine-3'-phosphate
  modified_base 10: mod_base = OTHER; note = uridine-3'-phosphate
  modified_base 11: mod_base = OTHER; note = guanosine-3'-phosphate
  modified_base 12: mod_base = OTHER; note = cytidine-3'-phosphate
  modified_base 13: mod_base = OTHER; note = cytidine-3'-phosphate
  modified_base 14: mod_base = OTHER; note = cytidine-3'-phosphate
  modified_base 15: mod_base = OTHER; note = adenosine-3'-phosphate
  modified_base 16: mod_base = OTHER; note = adenosine-3'-phosphate
  modified_base 17: mod_base = OTHER; note = guanosine-3'-phosphate
  modified_base 18: mod_base = OTHER; note = guanosine-3'-phosphate
  modified_base 19: mod_base = OTHER; note = uridine-3'-phosphate
  misc_feature 1..19: note = RNA
  misc_feature 20..21: note = DNA
gcatctcactgcccaaggttt

SEQ ID NO: 899 - DNA, 21 bp, synthetic construct
  source 1..21: mol_type = other DNA
  modified_base 1: mod_base = OTHER; note = guanosine-3'-phosphate
  modified_base 2: mod_base = OTHER; note = cytidine-3'-phosphate
  modified_base 3: mod_base = OTHER; note = cytidine-3'-phosphate
  modified_base 4: mod_base = OTHER; note = cytidine-3'-phosphate
  modified_base 5: mod_base = OTHER; note = adenosine-3'-phosphate
  modified_base 6: mod_base = OTHER; note = adenosine-3'-phosphate
  modified_base 7: mod_base = OTHER; note = guanosine-3'-phosphate
  modified_base 8: mod_base = OTHER; note = guanosine-3'-phosphate
  modified_base 9: mod_base = OTHER; note = uridine-3'-phosphate
  modified_base 10: mod_base = OTHER; note = cytidine-3'-phosphate
  modified_base 11: mod_base = OTHER; note = uridine-3'-phosphate
  modified_base 12: mod_base = OTHER; note = guanosine-3'-phosphate
  modified_base 13: mod_base = OTHER; note = uridine-3'-phosphate
  modified_base 14: mod_base = OTHER; note = guanosine-3'-phosphate
  modified_base 15: mod_base = OTHER; note = adenosine-3'-phosphate
  modified_base 16: mod_base = OTHER; note = uridine-3'-phosphate
  modified_base 17: mod_base = OTHER; note = guanosine-3'-phosphate
  modified_base 18: mod_base = OTHER; note = guanosine-3'-phosphate
  modified_base 19: mod_base = OTHER; note = guanosine-3'-phosphate
  misc_feature 1..19: note = RNA
  misc_feature 20..21: note = DNA
gcccaaggtctgtgatgggtt

SEQ ID NO: 900 - DNA, 21 bp, synthetic construct
  source 1..21: mol_type = other DNA
  modified_base 1: mod_base = OTHER; note = uridine-3'-phosphate
  modified_base 2: mod_base = OTHER; note = guanosine-3'-phosphate
  modified_base 3: mod_base = OTHER; note = uridine-3'-phosphate
  modified_base 4: mod_base = OTHER; note = guanosine-3'-phosphate
  modified_base 5: mod_base = OTHER; note = adenosine-3'-phosphate
  modified_base 6: mod_base = OTHER; note = uridine-3'-phosphate
  modified_base 7: mod_base = OTHER; note = guanosine-3'-phosphate
  modified_base 8: mod_base = OTHER; note = guanosine-3'-phosphate
  modified_base 9: mod_base = OTHER; note = guanosine-3'-phosphate
  modified_base 10: mod_base = OTHER; note = cytidine-3'-phosphate
  modified_base 11: mod_base = OTHER; note = adenosine-3'-phosphate
  modified_base 12: mod_base = OTHER; note = guanosine-3'-phosphate
  modified_base 13: mod_base = OTHER; note = cytidine-3'-phosphate
  modified_base 14: mod_base = OTHER; note = cytidine-3'-phosphate
  modified_base 15: mod_base = OTHER; note = uridine-3'-phosphate
  modified_base 16: mod_base = OTHER; note = guanosine-3'-phosphate
  modified_base 17: mod_base = OTHER; note = adenosine-3'-phosphate
  modified_base 18: mod_base = OTHER; note = uridine-3'-phosphate
  modified_base 19: mod_base = OTHER; note = uridine-3'-phosphate
  misc_feature 1..19: note = RNA
  misc_feature 20..21: note = DNA
tgtgatgggcagcctgatttt

SEQ ID NO: 901 - DNA, 21 bp, synthetic construct
  source 1..21: mol_type = other DNA
  modified_base 1: mod_base = OTHER; note = guanosine-3'-phosphate
  modified_base 2: mod_base = OTHER; note = cytidine-3'-phosphate
  modified_base 3: mod_base = OTHER; note = adenosine-3'-phosphate
  modified_base 4: mod_base = OTHER; note = guanosine-3'-phosphate
  modified_base 5: mod_base = OTHER; note = cytidine-3'-phosphate
  modified_base 6: mod_base = OTHER; note = cytidine-3'-phosphate
  modified_base 7: mod_base = OTHER; note = uridine-3'-phosphate
  modified_base 8: mod_base = OTHER; note = guanosine-3'-phosphate
  modified_base 9: mod_base = OTHER; note = adenosine-3'-phosphate
  modified_base 10: mod_base = OTHER; note = uridine-3'-phosphate
  modified_base 11: mod_base = OTHER; note = uridine-3'-phosphate
  modified_base 12: mod_base = OTHER; note = guanosine-3'-phosphate
  modified_base 13: mod_base = OTHER; note = uridine-3'-phosphate
  modified_base 14: mod_base = OTHER; note = cytidine-3'-phosphate
  modified_base 15: mod_base = OTHER; note = uridine-3'-phosphate
  modified_base 16: mod_base = OTHER; note = cytidine-3'-phosphate
  modified_base 17: mod_base = OTHER; note = adenosine-3'-phosphate
  modified_base 18: mod_base = OTHER; note = adenosine-3'-phosphate
  modified_base 19: mod_base = OTHER; note = cytidine-3'-phosphate
  misc_feature 1..19: note = RNA
  misc_feature 20..21: note = DNA
gcagcctgattgtctcaactt

SEQ ID NO: 902 - DNA, 21 bp, synthetic construct
  source 1..21: mol_type = other DNA
  modified_base 1: mod_base = OTHER; note = guanosine-3'-phosphate
  modified_base 2: mod_base = OTHER; note = uridine-3'-phosphate
  modified_base 3: mod_base = OTHER; note = cytidine-3'-phosphate
  modified_base 4: mod_base = OTHER; note = uridine-3'-phosphate
  modified_base 5: mod_base = OTHER; note = cytidine-3'-phosphate
  modified_base 6: mod_base = OTHER; note = adenosine-3'-phosphate
  modified_base 7: mod_base = OTHER; note = adenosine-3'-phosphate
  modified_base 8: mod_base = OTHER; note = cytidine-3'-phosphate
  modified_base 9: mod_base = OTHER; note = guanosine-3'-phosphate
  modified_base 10: mod_base = OTHER; note = guanosine-3'-phosphate
  modified_base 11: mod_base = OTHER; note = cytidine-3'-phosphate
  modified_base 12: mod_base = OTHER; note = adenosine-3'-phosphate
  modified_base 13: mod_base = OTHER; note = guanosine-3'-phosphate
  modified_base 14: mod_base = OTHER; note = cytidine-3'-phosphate
  modified_base 15: mod_base = OTHER; note = guanosine-3'-phosphate
  modified_base 16: mod_base = OTHER; note = adenosine-3'-phosphate
  modified_base 17: mod_base = OTHER; note = cytidine-3'-phosphate
  modified_base 18: mod_base = OTHER; note = guanosine-3'-phosphate
  modified_base 19: mod_base = OTHER; note = adenosine-3'-phosphate
  misc_feature 1..19: note = RNA
  misc_feature 20..21: note = DNA
gtctcaacggcagcgacgatt

SEQ ID NO: 903 - DNA, 21 bp, synthetic construct
  source 1..21: mol_type = other DNA
  modified_base 1: mod_base = OTHER; note = guanosine-3'-phosphate
  modified_base 2: mod_base = OTHER; note = cytidine-3'-phosphate
  modified_base 3: mod_base = OTHER; note = guanosine-3'-phosphate
  modified_base 4: mod_base = OTHER; note = adenosine-3'-phosphate
  modified_base 5: mod_base = OTHER; note = cytidine-3'-phosphate
  modified_base 6: mod_base = OTHER; note = guanosine-3'-phosphate
  modified_base 7: mod_base = OTHER; note = adenosine-3'-phosphate
  modified_base 8: mod_base = OTHER; note = adenosine-3'-phosphate
  modified_base 9: mod_base = OTHER; note = guanosine-3'-phosphate
  modified_base 10: mod_base = OTHER; note = adenosine-3'-phosphate
  modified_base 11: mod_base = OTHER; note = guanosine-3'-phosphate
  modified_base 12: mod_base = OTHER; note = cytidine-3'-phosphate
  modified_base 13: mod_base = OTHER; note = adenosine-3'-phosphate
  modified_base 14: mod_base = OTHER; note = guanosine-3'-phosphate
  modified_base 15: mod_base = OTHER; note = uridine-3'-phosphate
  modified_base 16: mod_base = OTHER; note = guanosine-3'-phosphate
  modified_base 17: mod_base = OTHER; note = cytidine-3'-phosphate
  modified_base 18: mod_base = OTHER; note = cytidine-3'-phosphate
  modified_base 19: mod_base = OTHER; note = adenosine-3'-phosphate
  misc_feature 1..19: note = RNA
  misc_feature 20..21: note = DNA
gcgacgaagagcagtgccatt

SEQ ID NO: 904 - DNA, 21 bp, synthetic construct
  source 1..21: mol_type = other DNA
  modified_base 1: mod_base = OTHER; note = adenosine-3'-phosphate
  modified_base 2: mod_base = OTHER; note = guanosine-3'-phosphate
  modified_base 3: mod_base = OTHER; note = cytidine-3'-phosphate
  modified_base 4: mod_base = OTHER; note = adenosine-3'-phosphate
  modified_base 5: mod_base = OTHER; note = guanosine-3'-phosphate
  modified_base 6: mod_base = OTHER; note = uridine-3'-phosphate
  modified_base 7: mod_base = OTHER; note = guanosine-3'-phosphate
  modified_base 8: mod_base = OTHER; note = cytidine-3'-phosphate
  modified_base 9: mod_base = OTHER; note = cytidine-3'-phosphate
  modified_base 10: mod_base = OTHER; note = adenosine-3'-phosphate
  modified_base 11: mod_base = OTHER; note = guanosine-3'-phosphate
  modified_base 12: mod_base = OTHER; note = guanosine-3'-phosphate
  modified_base 13: mod_base = OTHER; note = adenosine-3'-phosphate
  modified_base 14: mod_base = OTHER; note = adenosine-3'-phosphate
  modified_base 15: mod_base = OTHER; note = guanosine-3'-phosphate
  modified_base 16: mod_base = OTHER; note = guanosine-3'-phosphate
  modified_base 17: mod_base = OTHER; note = guanosine-3'-phosphate
  modified_base 18: mod_base = OTHER; note = guanosine-3'-phosphate
  modified_base 19: mod_base = OTHER; note = uridine-3'-phosphate
  misc_feature 1..19: note = RNA
  misc_feature 20..21: note = DNA
agcagtgccaggaaggggttt

SEQ ID NO: 905 - DNA, 21 bp, synthetic construct
  source 1..21: mol_type = other DNA
  modified_base 1: mod_base = OTHER; note = guanosine-3'-phosphate
  modified_base 2: mod_base = OTHER; note = adenosine-3'-phosphate
  modified_base 3: mod_base = OTHER; note = adenosine-3'-phosphate
  modified_base 4: mod_base = OTHER; note = guanosine-3'-phosphate
  modified_base 5: mod_base = OTHER; note = guanosine-3'-phosphate
  modified_base 6: mod_base = OTHER; note = guanosine-3'-phosphate
  modified_base 7: mod_base = OTHER; note = guanosine-3'-phosphate
  modified_base 8: mod_base = OTHER; note = uridine-3'-phosphate
  modified_base 9: mod_base = OTHER; note = guanosine-3'-phosphate
  modified_base 10: mod_base = OTHER; note = cytidine-3'-phosphate
  modified_base 11: mod_base = OTHER; note = cytidine-3'-phosphate
  modified_base 12: mod_base = OTHER; note = adenosine-3'-phosphate
  modified_base 13: mod_base = OTHER; note = uridine-3'-phosphate
  modified_base 14: mod_base = OTHER; note = guanosine-3'-phosphate
  modified_base 15: mod_base = OTHER; note = uridine-3'-phosphate
  modified_base 16: mod_base = OTHER; note = guanosine-3'-phosphate
  modified_base 17: mod_base = OTHER; note = guanosine-3'-phosphate
  modified_base 18: mod_base = OTHER; note = guanosine-3'-phosphate
  modified_base 19: mod_base = OTHER; note = adenosine-3'-phosphate
  misc_feature 1..19: note = RNA
  misc_feature 20..21: note = DNA
gaaggggtgccatgtgggatt

SEQ ID NO: 906 - DNA, 21 bp, synthetic construct
  source 1..21: mol_type = other DNA
  modified_base 1: mod_base = OTHER; note = cytidine-3'-phosphate
  modified_base 2: mod_base = OTHER; note = cytidine-3'-phosphate
  modified_base 3: mod_base = OTHER; note = adenosine-3'-phosphate
  modified_base 4: mod_base = OTHER; note = uridine-3'-phosphate
  modified_base 5: mod_base = OTHER; note = guanosine-3'-phosphate
  modified_base 6: mod_base = OTHER; note = uridine-3'-phosphate
  modified_base 7: mod_base = OTHER; note = guanosine-3'-phosphate
  modified_base 8: mod_base = OTHER; note = guanosine-3'-phosphate
  modified_base 9: mod_base = OTHER; note = guanosine-3'-phosphate
  modified_base 10: mod_base = OTHER; note = adenosine-3'-phosphate
  modified_base 11: mod_base = OTHER; note = cytidine-3'-phosphate
  modified_base 12: mod_base = OTHER; note = adenosine-3'-phosphate
  modified_base 13: mod_base = OTHER; note = uridine-3'-phosphate
  modified_base 14: mod_base = OTHER; note = uridine-3'-phosphate
  modified_base 15: mod_base = OTHER; note = cytidine-3'-phosphate
  modified_base 16: mod_base = OTHER; note = adenosine-3'-phosphate
  modified_base 17: mod_base = OTHER; note = cytidine-3'-phosphate
  modified_base 18: mod_base = OTHER; note = cytidine-3'-phosphate
  modified_base 19: mod_base = OTHER; note = uridine-3'-phosphate
  misc_feature 1..19: note = RNA
  misc_feature 20..21: note = DNA
ccatgtgggacattcaccttt

SEQ ID NO: 907 - DNA, 21 bp, synthetic construct
  source 1..21: mol_type = other DNA
  modified_base 1: mod_base = OTHER; note = cytidine-3'-phosphate
  modified_base 2: mod_base = OTHER; note = adenosine-3'-phosphate
  modified_base 3: mod_base = OTHER; note = uridine-3'-phosphate
  modified_base 4: mod_base = OTHER; note = uridine-3'-phosphate
  modified_base 5: mod_base = OTHER; note = cytidine-3'-phosphate
  modified_base 6: mod_base = OTHER; note = adenosine-3'-phosphate
  modified_base 7: mod_base = OTHER; note = cytidine-3'-phosphate
  modified_base 8: mod_base = OTHER; note = cytidine-3'-phosphate
  modified_base 9: mod_base = OTHER; note = uridine-3'-phosphate
  modified_base 10: mod_base = OTHER; note = uridine-3'-phosphate
  modified_base 11: mod_base = OTHER; note = cytidine-3'-phosphate
  modified_base 12: mod_base = OTHER; note = cytidine-3'-phosphate
  modified_base 13: mod_base = OTHER; note = adenosine-3'-phosphate
  modified_base 14: mod_base = OTHER; note = guanosine-3'-phosphate
  modified_base 15: mod_base = OTHER; note = uridine-3'-phosphate
  modified_base 16: mod_base = OTHER; note = guanosine-3'-phosphate
  modified_base 17: mod_base = OTHER; note = uridine-3'-phosphate
  modified_base 18: mod_base = OTHER; note = guanosine-3'-phosphate
  modified_base 19: mod_base = OTHER; note = adenosine-3'-phosphate
  misc_feature 1..19: note = RNA
  misc_feature 20..21: note = DNA
cattcaccttccagtgtgatt

SEQ ID NO: 908 - DNA, 21 bp, synthetic construct
  source 1..21: mol_type = other DNA
  modified_base 1: mod_base = OTHER; note = cytidine-3'-phosphate
  modified_base 2: mod_base = OTHER; note = adenosine-3'-phosphate
  modified_base 3: mod_base = OTHER; note = guanosine-3'-phosphate
  modified_base 4: mod_base = OTHER; note = uridine-3'-phosphate
  modified_base 5: mod_base = OTHER; note = guanosine-3'-phosphate
  modified_base 6: mod_base = OTHER; note = uridine-3'-phosphate
  modified_base 7: mod_base = OTHER; note = guanosine-3'-phosphate
  modified_base 8: mod_base = OTHER; note = adenosine-3'-phosphate
  modified_base 9: mod_base = OTHER; note = guanosine-3'-phosphate
  modified_base 10: mod_base = OTHER; note = guanosine-3'-phosphate
  modified_base 11: mod_base = OTHER; note = adenosine-3'-phosphate
  modified_base 12: mod_base = OTHER; note = cytidine-3'-phosphate
  modified_base 13: mod_base = OTHER; note = cytidine-3'-phosphate
  modified_base 14: mod_base = OTHER; note = guanosine-3'-phosphate
  modified_base 15: mod_base = OTHER; note = guanosine-3'-phosphate
  modified_base 16: mod_base = OTHER; note = adenosine-3'-phosphate
  modified_base 17: mod_base = OTHER; note = guanosine-3'-phosphate
  modified_base 18: mod_base = OTHER; note = cytidine-3'-phosphate
  modified_base 19: mod_base = OTHER; note = uridine-3'-phosphate
  misc_feature 1..19: note = RNA
  misc_feature 20..21: note = DNA
cagtgtgaggaccggagcttt

SEQ ID NO: 909 - DNA, 21 bp, synthetic construct
  source 1..21: mol_type = other DNA
  modified_base 1: mod_base = OTHER; note = guanosine-3'-phosphate
  modified_base 2: mod_base = OTHER; note = adenosine-3'-phosphate
  modified_base 3: mod_base = OTHER; note = cytidine-3'-phosphate
  modified_base 4: mod_base = OTHER; note = cytidine-3'-phosphate
  modified_base 5: mod_base = OTHER; note = guanosine-3'-phosphate
  modified_base 6: mod_base = OTHER; note = guanosine-3'-phosphate
  modified_base 7: mod_base = OTHER; note = adenosine-3'-phosphate
  modified_base 8: mod_base = OTHER; note = guanosine-3'-phosphate
  modified_base 9: mod_base = OTHER; note = cytidine-3'-phosphate
  modified_base 10: mod_base = OTHER; note = uridine-3'-phosphate
  modified_base 11: mod_base = OTHER; note = guanosine-3'-phosphate
  modified_base 12: mod_base = OTHER; note = cytidine-3'-phosphate
  modified_base 13: mod_base = OTHER; note = guanosine-3'-phosphate
  modified_base 14: mod_base = OTHER; note = uridine-3'-phosphate
  modified_base 15: mod_base = OTHER; note = guanosine-3'-phosphate
  modified_base 16: mod_base = OTHER; note = adenosine-3'-phosphate
  modified_base 17: mod_base = OTHER; note = adenosine-3'-phosphate
  modified_base 18: mod_base = OTHER; note = guanosine-3'-phosphate
  modified_base 19: mod_base = OTHER; note = adenosine-3'-phosphate
  misc_feature 1..19: note = RNA
  misc_feature 20..21: note = DNA
gaccggagctgcgtgaagatt

SEQ ID NO: 910 - DNA, 21 bp, synthetic construct
  source 1..21: mol_type = other DNA
  modified_base 1: mod_base = OTHER; note = cytidine-3'-phosphate
  modified_base 2: mod_base = OTHER; note = uridine-3'-phosphate
  modified_base 3: mod_base = OTHER; note = guanosine-3'-phosphate
  modified_base 4: mod_base = OTHER; note = cytidine-3'-phosphate
  modified_base 5: mod_base = OTHER; note = guanosine-3'-phosphate
  modified_base 6: mod_base = OTHER; note = uridine-3'-phosphate
  modified_base 7: mod_base = OTHER; note = guanosine-3'-phosphate
  modified_base 8: mod_base = OTHER; note = adenosine-3'-phosphate
  modified_base 9: mod_base = OTHER; note = adenosine-3'-phosphate
  modified_base 10: mod_base = OTHER; note = guanosine-3'-phosphate
  modified_base 11: mod_base = OTHER; note = adenosine-3'-phosphate
  modified_base 12: mod_base = OTHER; note = adenosine-3'-phosphate
  modified_base 13: mod_base = OTHER; note = guanosine-3'-phosphate
  modified_base 14: mod_base = OTHER; note = cytidine-3'-phosphate
  modified_base 15: mod_base = OTHER; note = cytidine-3'-phosphate
  modified_base 16: mod_base = OTHER; note = cytidine-3'-phosphate
  modified_base 17: mod_base = OTHER; note = adenosine-3'-phosphate
  modified_base 18: mod_base = OTHER; note = adenosine-3'-phosphate
  modified_base 19: mod_base = OTHER; note = cytidine-3'-phosphate
  misc_feature 1..19: note = RNA
  misc_feature 20..21: note = DNA
ctgcgtgaagaagcccaactt

SEQ ID NO: 911 - DNA, 21 bp, synthetic construct
  source 1..21: mol_type = other DNA
  modified_base 1: mod_base = OTHER; note = adenosine-3'-phosphate
  modified_base 2: mod_base = OTHER; note = guanosine-3'-phosphate
  modified_base 3: mod_base = OTHER; note = cytidine-3'-phosphate
  modified_base 4: mod_base = OTHER; note = cytidine-3'-phosphate
  modified_base 5: mod_base = OTHER; note = cytidine-3'-phosphate
  modified_base 6: mod_base = OTHER; note = adenosine-3'-phosphate
  modified_base 7: mod_base = OTHER; note = adenosine-3'-phosphate
  modified_base 8: mod_base = OTHER; note = cytidine-3'-phosphate
  modified_base 9: mod_base = OTHER; note = cytidine-3'-phosphate
  modified_base 10: mod_base = OTHER; note = cytidine-3'-phosphate
  modified_base 11: mod_base = OTHER; note = guanosine-3'-phosphate
  modified_base 12: mod_base = OTHER; note = cytidine-3'-phosphate
  modified_base 13: mod_base = OTHER; note = adenosine-3'-phosphate
  modified_base 14: mod_base = OTHER; note = guanosine-3'-phosphate
  modified_base 15: mod_base = OTHER; note = uridine-3'-phosphate
  modified_base 16: mod_base = OTHER; note = guanosine-3'-phosphate
  modified_base 17: mod_base = OTHER; note = uridine-3'-phosphate
  modified_base 18: mod_base = OTHER; note = guanosine-3'-phosphate
  modified_base 19: mod_base = OTHER; note = adenosine-3'-phosphate
  misc_feature 1..19: note = RNA
  misc_feature 20..21: note = DNA
agcccaacccgcagtgtgatt

SEQ ID NO: 912 - DNA, 21 bp, synthetic construct
  source 1..21: mol_type = other DNA
  modified_base 1: mod_base = OTHER; note = cytidine-3'-phosphate
  modified_base 2: mod_base = OTHER; note = adenosine-3'-phosphate
  modified_base 3: mod_base = OTHER; note = guanosine-3'-phosphate
  modified_base 4: mod_base = OTHER; note = uridine-3'-phosphate
  modified_base 5: mod_base = OTHER; note = guanosine-3'-phosphate
  modified_base 6: mod_base = OTHER; note = uridine-3'-phosphate
  modified_base 7: mod_base = OTHER; note = guanosine-3'-phosphate
  modified_base 8: mod_base = OTHER; note = adenosine-3'-phosphate
  modified_base 9: mod_base = OTHER; note = uridine-3'-phosphate
  modified_base 10: mod_base = OTHER; note = guanosine-3'-phosphate
  modified_base 11: mod_base = OTHER; note = guanosine-3'-phosphate
  modified_base 12: mod_base = OTHER; note = guanosine-3'-phosphate
  modified_base 13: mod_base = OTHER; note = cytidine-3'-phosphate
  modified_base 14: mod_base = OTHER; note = guanosine-3'-phosphate
  modified_base 15: mod_base = OTHER; note = guanosine-3'-phosphate
  modified_base 16: mod_base = OTHER; note = cytidine-3'-phosphate
  modified_base 17: mod_base = OTHER; note = cytidine-3'-phosphate
  modified_base 18: mod_base = OTHER; note = cytidine-3'-phosphate
  modified_base 19: mod_base = OTHER; note = guanosine-3'-phosphate
  misc_feature 1..19: note = RNA
  misc_feature 20..21: note = DNA
cagtgtgatgggcggcccgtt

SEQ ID NO: 913 - DNA, 21 bp, synthetic construct
  source 1..21: mol_type = other DNA
  modified_base 1: mod_base = OTHER; note = guanosine-3'-phosphate
  modified_base 2: mod_base = OTHER; note = cytidine-3'-phosphate
  modified_base 3: mod_base = OTHER; note = guanosine-3'-phosphate
  modified_base 4: mod_base = OTHER; note = guanosine-3'-phosphate
  modified_base 5: mod_base = OTHER; note = cytidine-3'-phosphate
  modified_base 6: mod_base = OTHER; note = cytidine-3'-phosphate
  modified_base 7: mod_base = OTHER; note = cytidine-3'-phosphate
  modified_base 8: mod_base = OTHER; note = guanosine-3'-phosphate
  modified_base 9: mod_base = OTHER; note = adenosine-3'-phosphate
  modified_base 10: mod_base = OTHER; note = cytidine-3'-phosphate
  modified_base 11: mod_base = OTHER; note = uridine-3'-phosphate
  modified_base 12: mod_base = OTHER; note = guanosine-3'-phosphate
  modified_base 13: mod_base = OTHER; note = cytidine-3'-phosphate
  modified_base 14: mod_base = OTHER; note = adenosine-3'-phosphate
  modified_base 15: mod_base = OTHER; note = guanosine-3'-phosphate
  modified_base 16: mod_base = OTHER; note = guanosine-3'-phosphate
  modified_base 17: mod_base = OTHER; note = guanosine-3'-phosphate
  modified_base 18: mod_base = OTHER; note = adenosine-3'-phosphate
  modified_base 19: mod_base = OTHER; note = cytidine-3'-phosphate
  misc_feature 1..19: note = RNA
  misc_feature 20..21: note = DNA
gcggcccgactgcagggactt

SEQ ID NO: 914 - DNA, 21 bp, synthetic construct
  source 1..21: mol_type = other DNA
  modified_base 1: mod_base = OTHER; note = cytidine-3'-phosphate
  modified_base 2: mod_base = OTHER; note = uridine-3'-phosphate
  modified_base 3: mod_base = OTHER; note = guanosine-3'-phosphate
  modified_base 4: mod_base = OTHER; note = cytidine-3'-phosphate
  modified_base 5: mod_base = OTHER; note = adenosine-3'-phosphate
  modified_base 6: mod_base = OTHER; note = guanosine-3'-phosphate
  modified_base 7: mod_base = OTHER; note = guanosine-3'-phosphate
  modified_base 8: mod_base = OTHER; note = guanosine-3'-phosphate
  modified_base 9: mod_base = OTHER; note = adenosine-3'-phosphate
  modified_base 10: mod_base = OTHER; note = cytidine-3'-phosphate
  modified_base 11: mod_base = OTHER; note = guanosine-3'-phosphate
  modified_base 12: mod_base = OTHER; note = guanosine-3'-phosphate
  modified_base 13: mod_base = OTHER; note = cytidine-3'-phosphate
  modified_base 14: mod_base = OTHER; note = uridine-3'-phosphate
  modified_base 15: mod_base = OTHER; note = cytidine-3'-phosphate
  modified_base 16: mod_base = OTHER; note = guanosine-3'-phosphate
  modified_base 17: mod_base = OTHER; note = guanosine-3'-phosphate
  modified_base 18: mod_base = OTHER; note = adenosine-3'-phosphate
  modified_base 19: mod_base = OTHER; note = uridine-3'-phosphate
  misc_feature 1..19: note = RNA
  misc_feature 20..21: note = DNA
ctgcagggacggctcggattt

SEQ ID NO: 915 - DNA, 21 bp, synthetic construct
  source 1..21: mol_type = other DNA
  modified_base 1: mod_base = OTHER; note = adenosine-3'-phosphate
  modified_base 2: mod_base = OTHER; note = cytidine-3'-phosphate
  modified_base 3: mod_base = OTHER; note = guanosine-3'-phosphate
  modified_base 4: mod_base = OTHER; note = guanosine-3'-phosphate
  modified_base 5: mod_base = OTHER; note = cytidine-3'-phosphate
  modified_base 6: mod_base = OTHER; note = uridine-3'-phosphate
  modified_base 7: mod_base = OTHER; note = cytidine-3'-phosphate
  modified_base 8: mod_base = OTHER; note = guanosine-3'-phosphate
  modified_base 9: mod_base = OTHER; note = guanosine-3'-phosphate
  modified_base 10: mod_base = OTHER; note = adenosine-3'-phosphate
  modified_base 11: mod_base = OTHER; note = uridine-3'-phosphate
  modified_base 12: mod_base = OTHER; note = guanosine-3'-phosphate
  modified_base 13: mod_base = OTHER; note = adenosine-3'-phosphate
  modified_base 14: mod_base = OTHER; note = guanosine-3'-phosphate
  modified_base 15: mod_base = OTHER; note = guanosine-3'-phosphate
  modified_base 16: mod_base = OTHER; note = adenosine-3'-phosphate
  modified_base 17: mod_base = OTHER; note = guanosine-3'-phosphate
  modified_base 18: mod_base = OTHER; note = cytidine-3'-phosphate
  modified_base 19: mod_base = OTHER; note = adenosine-3'-phosphate
  misc_feature 1..19: note = RNA
  misc_feature 20..21: note = DNA
acggctcggatgaggagcatt

SEQ ID NO: 916 - DNA, 21 bp, synthetic construct
  source 1..21: mol_type = other DNA
  modified_base 1: mod_base = OTHER; note = uridine-3'-phosphate
  modified_base 2: mod_base = OTHER; note = guanosine-3'-phosphate
  modified_base 3: mod_base = OTHER; note = adenosine-3'-phosphate
  modified_base 4: mod_base = OTHER; note = guanosine-3'-phosphate
  modified_base 5: mod_base = OTHER; note = guanosine-3'-phosphate
  modified_base 6: mod_base = OTHER; note = adenosine-3'-phosphate
  modified_base 7: mod_base = OTHER; note = guanosine-3'-phosphate
  modified_base 8: mod_base = OTHER; note = cytidine-3'-phosphate
  modified_base 9: mod_base = OTHER; note = adenosine-3'-phosphate
  modified_base 10: mod_base = OTHER; note = cytidine-3'-phosphate
  modified_base 11: mod_base = OTHER; note = uridine-3'-phosphate
  modified_base 12: mod_base = OTHER; note = guanosine-3'-phosphate
  modified_base 13: mod_base = OTHER; note = uridine-3'-phosphate
  modified_base 14: mod_base = OTHER; note = guanosine-3'-phosphate
  modified_base 15: mod_base = OTHER; note = adenosine-3'-phosphate
  modified_base 16: mod_base = OTHER; note = cytidine-3'-phosphate
  modified_base 17: mod_base = OTHER; note = uridine-3'-phosphate
  modified_base 18: mod_base = OTHER; note = guanosine-3'-phosphate
  modified_base 19: mod_base = OTHER; note = uridine-3'-phosphate
  misc_feature 1..19: note = RNA
  misc_feature 20..21: note = DNA
tgaggagcactgtgactgttt

SEQ ID NO: 917 - DNA, 21 bp, synthetic construct
  source 1..21: mol_type = other DNA
  modified_base 1: mod_base = OTHER; note = cytidine-3'-phosphate
  modified_base 2: mod_base = OTHER; note = uridine-3'-phosphate
  modified_base 3: mod_base = OTHER; note = guanosine-3'-phosphate
  modified_base 4: mod_base = OTHER; note = uridine-3'-phosphate
  modified_base 5: mod_base = OTHER; note = guanosine-3'-phosphate
  modified_base 6: mod_base = OTHER; note = adenosine-3'-phosphate
  modified_base 7: mod_base = OTHER; note = cytidine-3'-phosphate
  modified_base 8: mod_base = OTHER; note = uridine-3'-phosphate
  modified_base 9: mod_base = OTHER; note = guanosine-3'-phosphate
  modified_base 10: mod_base = OTHER; note = uridine-3'-phosphate
  modified_base 11: mod_base = OTHER; note = guanosine-3'-phosphate
  modified_base 12: mod_base = OTHER; note = guanosine-3'-phosphate
  modified_base 13: mod_base = OTHER; note = cytidine-3'-phosphate
  modified_base 14: mod_base = OTHER; note = cytidine-3'-phosphate
  modified_base 15: mod_base = OTHER; note = uridine-3'-phosphate
  modified_base 16: mod_base = OTHER; note = cytidine-3'-phosphate
  modified_base 17: mod_base = OTHER; note = cytidine-3'-phosphate
  modified_base 18: mod_base = OTHER; note = adenosine-3'-phosphate
  modified_base 19: mod_base = OTHER; note = guanosine-3'-phosphate
  misc_feature 1..19: note = RNA
  misc_feature 20..21: note = DNA
ctgtgactgtggcctccagtt

SEQ ID NO: 918 - DNA, 21 bp, synthetic construct
  source 1..21: mol_type = other DNA
  modified_base 1: mod_base = OTHER; note = guanosine-3'-phosphate
  modified_base 2: mod_base = OTHER; note = cytidine-3'-phosphate
  modified_base 3: mod_base = OTHER; note = cytidine-3'-phosphate
  modified_base 4: mod_base = OTHER; note = uridine-3'-phosphate
  modified_base 5: mod_base = OTHER; note = cytidine-3'-phosphate
  modified_base 6: mod_base = OTHER; note = cytidine-3'-phosphate
  modified_base 7: mod_base = OTHER; note = adenosine-3'-phosphate
  modified_base 8: mod_base = OTHER; note = guanosine-3'-phosphate
  modified_base 9: mod_base = OTHER; note = guanosine-3'-phosphate
  modified_base 10: mod_base = OTHER; note = guanosine-3'-phosphate
  modified_base 11: mod_base = OTHER; note = cytidine-3'-phosphate
  modified_base 12: mod_base = OTHER; note = cytidine-3'-phosphate
  modified_base 13: mod_base = OTHER; note = cytidine-3'-phosphate
  modified_base 14: mod_base = OTHER; note = cytidine-3'-phosphate
  modified_base 15: mod_base = OTHER; note = uridine-3'-phosphate
  modified_base 16: mod_base = OTHER; note = cytidine-3'-phosphate
  modified_base 17: mod_base = OTHER; note = cytidine-3'-phosphate
  modified_base 18: mod_base = OTHER; note = adenosine-3'-phosphate
  modified_base 19: mod_base = OTHER; note = guanosine-3'-phosphate
  misc_feature 1..19: note = RNA
  misc_feature 20..21: note = DNA
gcctccagggcccctccagtt

SEQ ID NO: 919 - DNA, 21 bp, synthetic construct
  source 1..21: mol_type = other DNA
  modified_base 1: mod_base = OTHER; note = cytidine-3'-phosphate
  modified_base 2: mod_base = OTHER; note = cytidine-3'-phosphate
  modified_base 3: mod_base = OTHER; note = cytidine-3'-phosphate
  modified_base 4: mod_base = OTHER; note = cytidine-3'-phosphate
  modified_base 5: mod_base = OTHER; note = uridine-3'-phosphate
  modified_base 6: mod_base = OTHER; note = cytidine-3'-phosphate
  modified_base 7: mod_base = OTHER; note = cytidine-3'-phosphate
  modified_base 8: mod_base = OTHER; note = adenosine-3'-phosphate
  modified_base 9: mod_base = OTHER; note = guanosine-3'-phosphate
  modified_base 10: mod_base = OTHER; note = cytidine-3'-phosphate
  modified_base 11: mod_base = OTHER; note = cytidine-3'-phosphate
  modified_base 12: mod_base = OTHER; note = guanosine-3'-phosphate
  modified_base 13: mod_base = OTHER; note = cytidine-3'-phosphate
  modified_base 14: mod_base = OTHER; note = adenosine-3'-phosphate
  modified_base 15: mod_base = OTHER; note = uridine-3'-phosphate
  modified_base 16: mod_base = OTHER; note = uridine-3'-phosphate
  modified_base 17: mod_base = OTHER; note = guanosine-3'-phosphate
  modified_base 18: mod_base = OTHER; note = uridine-3'-phosphate
  modified_base 19: mod_base = OTHER; note = uridine-3'-phosphate
  misc_feature 1..19: note = RNA
  misc_feature 20..21: note = DNA
cccctccagccgcattgtttt

SEQ ID NO: 920 - DNA, 21 bp, synthetic construct
  source 1..21: mol_type = other DNA
  modified_base 1: mod_base = OTHER; note = cytidine-3'-phosphate
  modified_base 2: mod_base = OTHER; note = cytidine-3'-phosphate
  modified_base 3: mod_base = OTHER; note = guanosine-3'-phosphate
  modified_base 4: mod_base = OTHER; note = cytidine-3'-phosphate
  modified_base 5: mod_base = OTHER; note = adenosine-3'-phosphate
  modified_base 6: mod_base = OTHER; note = uridine-3'-phosphate
  modified_base 7: mod_base = OTHER; note = uridine-3'-phosphate
  modified_base 8: mod_base = OTHER; note = guanosine-3'-phosphate
  modified_base 9: mod_base = OTHER; note = uridine-3'-phosphate
  modified_base 10: mod_base = OTHER; note = uridine-3'-phosphate
  modified_base 11: mod_base = OTHER; note = guanosine-3'-phosphate
  modified_base 12: mod_base = OTHER; note = guanosine-3'-phosphate
  modified_base 13: mod_base = OTHER; note = uridine-3'-phosphate
  modified_base 14: mod_base = OTHER; note = guanosine-3'-phosphate
  modified_base 15: mod_base = OTHER; note = guanosine-3'-phosphate
  modified_base 16: mod_base = OTHER; note = adenosine-3'-phosphate
  modified_base 17: mod_base = OTHER; note = guanosine-3'-phosphate
  modified_base 18: mod_base = OTHER; note = cytidine-3'-phosphate
  modified_base 19: mod_base = OTHER; note = uridine-3'-phosphate
  misc_feature 1..19: note = RNA
  misc_feature 20..21: note = DNA
ccgcattgttggtggagcttt

SEQ ID NO: 921 - DNA, 21 bp, synthetic construct
  source 1..21: mol_type = other DNA
  modified_base 1: mod_base = OTHER; note = guanosine-3'-phosphate
  modified_base 2: mod_base = OTHER; note = uridine-3'-phosphate
  modified_base 3: mod_base = OTHER; note = guanosine-3'-phosphate
  modified_base 4: mod_base = OTHER; note = guanosine-3'-phosphate
  modified_base 5: mod_base = OTHER; note = adenosine-3'-phosphate
  modified_base 6: mod_base = OTHER; note = guanosine-3'-phosphate
  modified_base 7: mod_base = OTHER; note = cytidine-3'-phosphate
  modified_base 8: mod_base = OTHER; note = uridine-3'-phosphate
  modified_base 9: mod_base = OTHER; note = guanosine-3'-phosphate
  modified_base 10: mod_base = OTHER; note = uridine-3'-phosphate
  modified_base 11: mod_base = OTHER; note = guanosine-3'-phosphate
  modified_base 12: mod_base = OTHER; note = uridine-3'-phosphate
  modified_base 13: mod_base = OTHER; note = cytidine-3'-phosphate
  modified_base 14: mod_base = OTHER; note = cytidine-3'-phosphate
  modified_base 15: mod_base = OTHER; note = uridine-3'-phosphate
  modified_base 16: mod_base = OTHER; note = cytidine-3'-phosphate
  modified_base 17: mod_base = OTHER; note = cytidine-3'-phosphate
  modified_base 18: mod_base = OTHER; note = guanosine-3'-phosphate
  modified_base 19: mod_base = OTHER; note = adenosine-3'-phosphate
  misc_feature 1..19: note = RNA
  misc_feature 20..21: note = DNA
gtggagctgtgtcctccgatt

SEQ ID NO: 922 - DNA, 21 bp, synthetic construct
  source 1..21: mol_type = other DNA
  modified_base 1: mod_base = OTHER; note = cytidine-3'-phosphate
  modified_base 2: mod_base = OTHER; note = uridine-3'-phosphate
  modified_base 3: mod_base = OTHER; note = cytidine-3'-phosphate
  modified_base 4: mod_base = OTHER; note = cytidine-3'-phosphate
  modified_base 5: mod_base = OTHER; note = guanosine-3'-phosphate
  modified_base 6: mod_base = OTHER; note = adenosine-3'-phosphate
  modified_base 7: mod_base = OTHER; note = guanosine-3'-phosphate
  modified_base 8: mod_base = OTHER; note = guanosine-3'-phosphate
  modified_base 9: mod_base = OTHER; note = guanosine-3'-phosphate
  modified_base 10: mod_base = OTHER; note = uridine-3'-phosphate
  modified_base 11: mod_base = OTHER; note = guanosine-3'-phosphate
  modified_base 12: mod_base = OTHER; note = adenosine-3'-phosphate
  modified_base 13: mod_base = OTHER; note = guanosine-3'-phosphate
  modified_base 14: mod_base = OTHER; note = uridine-3'-phosphate
  modified_base 15: mod_base = OTHER; note = guanosine-3'-phosphate
  modified_base 16: mod_base = OTHER; note = guanosine-3'-phosphate
  modified_base 17: mod_base = OTHER; note = cytidine-3'-phosphate
  modified_base 18: mod_base = OTHER; note = cytidine-3'-phosphate
  modified_base 19: mod_base = OTHER; note = adenosine-3'-phosphate
  misc_feature 1..19: note = RNA
  misc_feature 20..21: note = DNA
ctccgagggtgagtggccatt

SEQ ID NO: 923 - DNA, 21 bp, synthetic construct
  source 1..21: mol_type = other DNA
  modified_base 1: mod_base = OTHER; note = guanosine-3'-phosphate
  modified_base 2: mod_base = OTHER; note = guanosine-3'-phosphate
  modified_base 3: mod_base = OTHER; note = guanosine-3'-phosphate
  modified_base 4: mod_base = OTHER; note = uridine-3'-phosphate
  modified_base 5: mod_base = OTHER; note = guanosine-3'-phosphate
  modified_base 6: mod_base = OTHER; note = adenosine-3'-phosphate
  modified_base 7: mod_base = OTHER; note = guanosine-3'-phosphate
  modified_base 8: mod_base = OTHER; note = uridine-3'-phosphate
  modified_base 9: mod_base = OTHER; note = guanosine-3'-phosphate
  modified_base 10: mod_base = OTHER; note = guanosine-3'-phosphate
  modified_base 11: mod_base = OTHER; note = cytidine-3'-phosphate
  modified_base 12: mod_base = OTHER; note = cytidine-3'-phosphate
  modified_base 13: mod_base = OTHER; note = adenosine-3'-phosphate
  modified_base 14: mod_base = OTHER; note = uridine-3'-phosphate
  modified_base 15: mod_base = OTHER; note = guanosine-3'-phosphate
  modified_base 16: mod_base = OTHER; note = guanosine-3'-phosphate
  modified_base 17: mod_base = OTHER; note = cytidine-3'-phosphate
  modified_base 18: mod_base = OTHER; note = adenosine-3'-phosphate
  modified_base 19: mod_base = OTHER; note = guanosine-3'-phosphate
  misc_feature 1..19: note = RNA
  misc_feature 20..21: note = DNA
gggtgagtggccatggcagtt

SEQ ID NO: 924 - DNA, 21 bp, synthetic construct
  source 1..21: mol_type = other DNA
  modified_base 1: mod_base = OTHER; note = adenosine-3'-phosphate
  modified_base 2: mod_base = OTHER; note = uridine-3'-phosphate
  modified_base 3: mod_base = OTHER; note = guanosine-3'-phosphate
  modified_base 4: mod_base = OTHER; note = guanosine-3'-phosphate
  modified_base 5: mod_base = OTHER; note = cytidine-3'-phosphate
  modified_base 6: mod_base = OTHER; note = adenosine-3'-phosphate
  modified_base 7: mod_base = OTHER; note = guanosine-3'-phosphate
  modified_base 8: mod_base = OTHER; note = guanosine-3'-phosphate
  modified_base 9: mod_base = OTHER; note = cytidine-3'-phosphate
  modified_base 10: mod_base = OTHER; note = cytidine-3'-phosphate
  modified_base 11: mod_base = OTHER; note = adenosine-3'-phosphate
  modified_base 12: mod_base = OTHER; note = guanosine-3'-phosphate
  modified_base 13: mod_base = OTHER; note = cytidine-3'-phosphate
  modified_base 14: mod_base = OTHER; note = cytidine-3'-phosphate
  modified_base 15: mod_base = OTHER; note = uridine-3'-phosphate
  modified_base 16: mod_base = OTHER; note = cytidine-3'-phosphate
  modified_base 17: mod_base = OTHER; note = cytidine-3'-phosphate
  modified_base 18: mod_base = OTHER; note = adenosine-3'-phosphate
  modified_base 19: mod_base = OTHER; note = guanosine-3'-phosphate
  misc_feature 1..19: note = RNA
  misc_feature 20..21: note = DNA
atggcaggccagcctccagtt

SEQ ID NO: 925 - DNA, 21 bp, synthetic construct
  source 1..21: mol_type = other DNA
  modified_base 1: mod_base = OTHER; note = cytidine-3'-phosphate
  modified_base 2: mod_base = OTHER; note = cytidine-3'-phosphate
  modified_base 3: mod_base = OTHER; note = uridine-3'-phosphate
  modified_base 4: mod_base = OTHER; note = cytidine-3'-phosphate
  modified_base 5: mod_base = OTHER; note = cytidine-3'-phosphate
  modified_base 6: mod_base = OTHER; note = adenosine-3'-phosphate
  modified_base 7: mod_base = OTHER; note = guanosine-3'-phosphate
  modified_base 8: mod_base = OTHER; note = guanosine-3'-phosphate
  modified_base 9: mod_base = OTHER; note = uridine-3'-phosphate
  modified_base 10: mod_base = OTHER; note = uridine-3'-phosphate
  modified_base 11: mod_base = OTHER; note = cytidine-3'-phosphate
  modified_base 12: mod_base = OTHER; note = guanosine-3'-phosphate
  modified_base 13: mod_base = OTHER; note = guanosine-3'-phosphate
  modified_base 14: mod_base = OTHER; note = guanosine-3'-phosphate
  modified_base 15: mod_base = OTHER; note = guanosine-3'-phosphate
  modified_base 16: mod_base = OTHER; note = uridine-3'-phosphate
  modified_base 17: mod_base = OTHER; note = cytidine-3'-phosphate
  modified_base 18: mod_base = OTHER; note = guanosine-3'-phosphate
  modified_base 19: mod_base = OTHER; note = adenosine-3'-phosphate
  misc_feature 1..19: note = RNA
  misc_feature 20..21: note = DNA
cctccaggttcggggtcgatt

SEQ ID NO: 926 - DNA, 21 bp, synthetic construct
  source 1..21: mol_type = other DNA
  modified_base 1: mod_base = OTHER; note = guanosine-3'-phosphate
  modified_base 2: mod_base = OTHER; note = guanosine-3'-phosphate
  modified_base 3: mod_base = OTHER; note = uridine-3'-phosphate
  modified_base 4: mod_base = OTHER; note = uridine-3'-phosphate
  modified_base 5: mod_base = OTHER; note = cytidine-3'-phosphate
  modified_base 6: mod_base = OTHER; note = guanosine-3'-phosphate
  modified_base 7: mod_base = OTHER; note = guanosine-3'-phosphate
  modified_base 8: mod_base = OTHER; note = guanosine-3'-phosphate
  modified_base 9: mod_base = OTHER; note = guanosine-3'-phosphate
  modified_base 10: mod_base = OTHER; note = uridine-3'-phosphate
  modified_base 11: mod_base = OTHER; note = cytidine-3'-phosphate
  modified_base 12: mod_base = OTHER; note = guanosine-3'-phosphate
  modified_base 13: mod_base = OTHER; note = adenosine-3'-phosphate
  modified_base 14: mod_base = OTHER; note = cytidine-3'-phosphate
  modified_base 15: mod_base = OTHER; note = adenosine-3'-phosphate
  modified_base 16: mod_base = OTHER; note = cytidine-3'-phosphate
  modified_base 17: mod_base = OTHER; note = adenosine-3'-phosphate
  modified_base 18: mod_base = OTHER; note = uridine-3'-phosphate
  modified_base 19: mod_base = OTHER; note = cytidine-3'-phosphate
  misc_feature 1..19: note = RNA
  misc_feature 20..21: note = DNA
ggttcggggtcgacacatctt

SEQ ID NO: 927 - DNA, 21 bp, synthetic construct
  source 1..21: mol_type = other DNA
  modified_base 1: mod_base = OTHER; note = adenosine-3'-phosphate
  modified_base 2: mod_base = OTHER; note = cytidine-3'-phosphate
  modified_base 3: mod_base = OTHER; note = adenosine-3'-phosphate
  modified_base 4: mod_base = OTHER; note = uridine-3'-phosphate
  modified_base 5: mod_base = OTHER; note = cytidine-3'-phosphate
  modified_base 6: mod_base = OTHER; note = uridine-3'-phosphate
  modified_base 7: mod_base = OTHER; note = guanosine-3'-phosphate
  modified_base 8: mod_base = OTHER; note = uridine-3'-phosphate
  modified_base 9: mod_base = OTHER; note = guanosine-3'-phosphate
  modified_base 10: mod_base = OTHER; note = guanosine-3'-phosphate
  modified_base 11: mod_base = OTHER; note = guanosine-3'-phosphate
  modified_base 12: mod_base = OTHER; note = guanosine-3'-phosphate
  modified_base 13: mod_base = OTHER; note = guanosine-3'-phosphate
  modified_base 14: mod_base = OTHER; note = guanosine-3'-phosphate
  modified_base 15: mod_base = OTHER; note = guanosine-3'-phosphate
  modified_base 16: mod_base = OTHER; note = cytidine-3'-phosphate
  modified_base 17: mod_base = OTHER; note = cytidine-3'-phosphate
  modified_base 18: mod_base = OTHER; note = cytidine-3'-phosphate
  modified_base 19: mod_base = OTHER; note = uridine-3'-phosphate
  misc_feature 1..19: note = RNA
  misc_feature 20..21: note = DNA
acatctgtgggggggcccttt

SEQ ID NO: 928 - DNA, 21 bp, synthetic construct
  source 1..21: mol_type = other DNA
  modified_base 1: mod_base = OTHER; note = guanosine-3'-phosphate
  modified_base 2: mod_base = OTHER; note = uridine-3'-phosphate
  modified_base 3: mod_base = OTHER; note = guanosine-3'-phosphate
  modified_base 4: mod_base = OTHER; note = guanosine-3'-phosphate
  modified_base 5: mod_base = OTHER; note = guanosine-3'-phosphate
  modified_base 6: mod_base = OTHER; note = guanosine-3'-phosphate
  modified_base 7: mod_base = OTHER; note = guanosine-3'-phosphate
  modified_base 8: mod_base = OTHER; note = guanosine-3'-phosphate
  modified_base 9: mod_base = OTHER; note = guanosine-3'-phosphate
  modified_base 10: mod_base = OTHER; note = cytidine-3'-phosphate
  modified_base 11: mod_base = OTHER; note = cytidine-3'-phosphate
  modified_base 12: mod_base = OTHER; note = cytidine-3'-phosphate
  modified_base 13: mod_base = OTHER; note = uridine-3'-phosphate
  modified_base 14: mod_base = OTHER; note = cytidine-3'-phosphate
  modified_base 15: mod_base = OTHER; note = adenosine-3'-phosphate
  modified_base 16: mod_base = OTHER; note = uridine-3'-phosphate
  modified_base 17: mod_base = OTHER; note = cytidine-3'-phosphate
  modified_base 18: mod_base = OTHER; note = guanosine-3'-phosphate
  modified_base 19: mod_base = OTHER; note = cytidine-3'-phosphate
  misc_feature 1..19: note = RNA
  misc_feature 20..21: note = DNA
gtgggggggccctcatcgctt

SEQ ID NO: 929 - DNA, 21 bp, synthetic construct
  source 1..21: mol_type = other DNA
  modified_base 1: mod_base = OTHER; note = adenosine-3'-phosphate
  modified_base 2: mod_base = OTHER; note = uridine-3'-phosphate
  modified_base 3: mod_base = OTHER; note = cytidine-3'-phosphate
  modified_base 4: mod_base = OTHER; note = guanosine-3'-phosphate
  modified_base 5: mod_base = OTHER; note = cytidine-3'-phosphate
  modified_base 6: mod_base = OTHER; note = uridine-3'-phosphate
  modified_base 7: mod_base = OTHER; note = guanosine-3'-phosphate
  modified_base 8: mod_base = OTHER; note = adenosine-3'-phosphate
  modified_base 9: mod_base = OTHER; note = cytidine-3'-phosphate
  modified_base 10: mod_base = OTHER; note = cytidine-3'-phosphate
  modified_base 11: mod_base = OTHER; note = guanosine-3'-phosphate
  modified_base 12: mod_base = OTHER; note = cytidine-3'-phosphate
  modified_base 13: mod_base = OTHER; note = uridine-3'-phosphate
  modified_base 14: mod_base = OTHER; note = guanosine-3'-phosphate
  modified_base 15: mod_base = OTHER; note = guanosine-3'-phosphate
  modified_base 16: mod_base = OTHER; note = guanosine-3'-phosphate
  modified_base 17: mod_base = OTHER; note = uridine-3'-phosphate
  modified_base 18: mod_base = OTHER; note = guanosine-3'-phosphate
  modified_base 19: mod_base = OTHER; note = adenosine-3'-phosphate
  misc_feature 1..19: note = RNA
  misc_feature 20..21: note = DNA
atcgctgaccgctgggtgatt

SEQ ID NO: 930 - DNA, 21 bp, synthetic construct
  source 1..21: mol_type = other DNA
  modified_base 1: mod_base = OTHER; note = adenosine-3'-phosphate
  modified_base 2: mod_base = OTHER; note = cytidine-3'-phosphate
  modified_base 3: mod_base = OTHER; note = cytidine-3'-phosphate
  modified_base 4: mod_base = OTHER; note = guanosine-3'-phosphate
  modified_base 5: mod_base = OTHER; note = cytidine-3'-phosphate
  modified_base 6: mod_base = OTHER; note = uridine-3'-phosphate
  modified_base 7: mod_base = OTHER; note = guanosine-3'-phosphate
  modified_base 8: mod_base = OTHER; note = guanosine-3'-phosphate
  modified_base 9: mod_base = OTHER; note = guanosine-3'-phosphate
  modified_base 10: mod_base = OTHER; note = uridine-3'-phosphate
  modified_base 11: mod_base = OTHER; note = guanosine-3'-phosphate
  modified_base 12: mod_base = OTHER; note = adenosine-3'-phosphate
  modified_base 13: mod_base = OTHER; note = uridine-3'-phosphate
  modified_base 14: mod_base = OTHER; note = adenosine-3'-phosphate
  modified_base 15: mod_base = OTHER; note = adenosine-3'-phosphate
  modified_base 16: mod_base = OTHER; note = cytidine-3'-phosphate
  modified_base 17: mod_base = OTHER; note = adenosine-3'-phosphate
  modified_base 18: mod_base = OTHER; note = guanosine-3'-phosphate
  modified_base 19: mod_base = OTHER; note = cytidine-3'-phosphate
  misc_feature 1..19: note = RNA
  misc_feature 20..21: note = DNA
accgctgggtgataacagctt

SEQ ID NO: 931 - DNA, 21 bp, synthetic construct
  source 1..21: mol_type = other DNA
  modified_base 1: mod_base = OTHER; note = uridine-3'-phosphate
  modified_base 2: mod_base = OTHER; note = guanosine-3'-phosphate
  modified_base 3: mod_base = OTHER; note = adenosine-3'-phosphate
  modified_base 4: mod_base = OTHER; note = uridine-3'-phosphate
  modified_base 5: mod_base = OTHER; note = adenosine-3'-phosphate
  modified_base 6: mod_base = OTHER; note = adenosine-3'-phosphate
  modified_base 7: mod_base = OTHER; note = cytidine-3'-phosphate
  modified_base 8: mod_base = OTHER; note = adenosine-3'-phosphate
  modified_base 9: mod_base = OTHER; note = guanosine-3'-phosphate
  modified_base 10: mod_base = OTHER; note = cytidine-3'-phosphate
  modified_base 11: mod_base = OTHER; note = uridine-3'-phosphate
  modified_base 12: mod_base = OTHER; note = guanosine-3'-phosphate
  modified_base 13: mod_base = OTHER; note = cytidine-3'-phosphate
  modified_base 14: mod_base = OTHER; note = cytidine-3'-phosphate
  modified_base 15: mod_base = OTHER; note = cytidine-3'-phosphate
  modified_base 16: mod_base = OTHER; note = adenosine-3'-phosphate
  modified_base 17: mod_base = OTHER; note = cytidine-3'-phosphate
  modified_base 18: mod_base = OTHER; note = uridine-3'-phosphate
  modified_base 19: mod_base = OTHER; note = guanosine-3'-phosphate
  misc_feature 1..19: note = RNA
  misc_feature 20..21: note = DNA
tgataacagctgcccactgtt

SEQ ID NO: 932 - DNA, 21 bp, synthetic construct
  source 1..21: mol_type = other DNA
  modified_base 1: mod_base = OTHER; note = cytidine-3'-phosphate
  modified_base 2: mod_base = OTHER; note = cytidine-3'-phosphate
  modified_base 3: mod_base = OTHER; note = cytidine-3'-phosphate
  modified_base 4: mod_base = OTHER; note = adenosine-3'-phosphate
  modified_base 5: mod_base = OTHER; note = cytidine-3'-phosphate
  modified_base 6: mod_base = OTHER; note = uridine-3'-phosphate
  modified_base 7: mod_base = OTHER; note = guanosine-3'-phosphate
  modified_base 8: mod_base = OTHER; note = cytidine-3'-phosphate
  modified_base 9: mod_base = OTHER; note = uridine-3'-phosphate
  modified_base 10: mod_base = OTHER; note = uridine-3'-phosphate
  modified_base 11: mod_base = OTHER; note = cytidine-3'-phosphate
  modified_base 12: mod_base = OTHER; note = cytidine-3'-phosphate
  modified_base 13: mod_base = OTHER; note = adenosine-3'-phosphate
  modified_base 14: mod_base = OTHER; note = guanosine-3'-phosphate
  modified_base 15: mod_base = OTHER; note = guanosine-3'-phosphate
  modified_base 16: mod_base = OTHER; note = adenosine-3'-phosphate
  modified_base 17: mod_base = OTHER; note = guanosine-3'-phosphate
  modified_base 18: mod_base = OTHER; note = guanosine-3'-phosphate
  modified_base 19: mod_base = OTHER; note = adenosine-3'-phosphate
  misc_feature 1..19: note = RNA
  misc_feature 20..21: note = DNA
cccactgcttccaggaggatt

SEQ ID NO: 933 - DNA, 21 bp, synthetic construct
  source 1..21: mol_type = other DNA
  modified_base 1: mod_base = OTHER; note = cytidine-3'-phosphate
  modified_base 2: mod_base = OTHER; note = cytidine-3'-phosphate
  modified_base 3: mod_base = OTHER; note = adenosine-3'-phosphate
  modified_base 4: mod_base = OTHER; note = guanosine-3'-phosphate
  modified_base 5: mod_base = OTHER; note = guanosine-3'-phosphate
  modified_base 6: mod_base = OTHER; note = adenosine-3'-phosphate
  modified_base 7: mod_base = OTHER; note = guanosine-3'-phosphate
  modified_base 8: mod_base = OTHER; note = guanosine-3'-phosphate
  modified_base 9: mod_base = OTHER; note = adenosine-3'-phosphate
  modified_base 10: mod_base = OTHER; note = cytidine-3'-phosphate
  modified_base 11: mod_base = OTHER; note = adenosine-3'-phosphate
  modified_base 12: mod_base = OTHER; note = guanosine-3'-phosphate
  modified_base 13: mod_base = OTHER; note = cytidine-3'-phosphate
  modified_base 14: mod_base = OTHER; note = adenosine-3'-phosphate
  modified_base 15: mod_base = OTHER; note = uridine-3'-phosphate
  modified_base 16: mod_base = OTHER; note = guanosine-3'-phosphate
  modified_base 17: mod_base = OTHER; note = guanosine-3'-phosphate
  modified_base 18: mod_base = OTHER; note = cytidine-3'-phosphate
  modified_base 19: mod_base = OTHER; note = cytidine-3'-phosphate
  misc_feature 1..19: note = RNA
  misc_feature 20..21: note = DNA
ccaggaggacagcatggcctt

SEQ ID NO: 934 - DNA, 21 bp, synthetic construct
  source 1..21: mol_type = other DNA
  modified_base 1: mod_base = OTHER; note = adenosine-3'-phosphate
  modified_base 2: mod_base = OTHER; note = cytidine-3'-phosphate
  modified_base 3: mod_base = OTHER; note = adenosine-3'-phosphate
  modified_base 4: mod_base = OTHER; note = guanosine-3'-phosphate
  modified_base 5: mod_base = OTHER; note = cytidine-3'-phosphate
  modified_base 6: mod_base = OTHER; note = adenosine-3'-phosphate
  modified_base 7: mod_base = OTHER; note = uridine-3'-phosphate
  modified_base 8: mod_base = OTHER; note = guanosine-3'-phosphate
  modified_base 9: mod_base = OTHER; note = guanosine-3'-phosphate
  modified_base 10: mod_base = OTHER; note = cytidine-3'-phosphate
  modified_base 11: mod_base = OTHER; note = cytidine-3'-phosphate
  modified_base 12: mod_base = OTHER; note = uridine-3'-phosphate
  modified_base 13: mod_base = OTHER; note = cytidine-3'-phosphate
  modified_base 14: mod_base = OTHER; note = cytidine-3'-phosphate
  modified_base 15: mod_base = OTHER; note = adenosine-3'-phosphate
  modified_base 16: mod_base = OTHER; note = cytidine-3'-phosphate
  modified_base 17: mod_base = OTHER; note = guanosine-3'-phosphate
  modified_base 18: mod_base = OTHER; note = guanosine-3'-phosphate
  modified_base 19: mod_base = OTHER; note = uridine-3'-phosphate
  misc_feature 1..19: note = RNA
  misc_feature 20..21: note = DNA
acagcatggcctccacggttt

SEQ ID NO: 935 - DNA, 21 bp, synthetic construct
  source 1..21: mol_type = other DNA
  modified_base 1: mod_base = OTHER; note = cytidine-3'-phosphate
  modified_base 2: mod_base = OTHER; note = cytidine-3'-phosphate
  modified_base 3: mod_base = OTHER; note = adenosine-3'-phosphate
  modified_base 4: mod_base = OTHER; note = cytidine-3'-phosphate
  modified_base 5: mod_base = OTHER; note = guanosine-3'-phosphate
  modified_base 6: mod_base = OTHER; note = guanosine-3'-phosphate
  modified_base 7: mod_base = OTHER; note = uridine-3'-phosphate
  modified_base 8: mod_base = OTHER; note = guanosine-3'-phosphate
  modified_base 9: mod_base = OTHER; note = cytidine-3'-phosphate
  modified_base 10: mod_base = OTHER; note = uridine-3'-phosphate
  modified_base 11: mod_base = OTHER; note = guanosine-3'-phosphate
  modified_base 12: mod_base = OTHER; note = uridine-3'-phosphate
  modified_base 13: mod_base = OTHER; note = guanosine-3'-phosphate
  modified_base 14: mod_base = OTHER; note = guanosine-3'-phosphate
  modified_base 15: mod_base = OTHER; note = adenosine-3'-phosphate
  modified_base 16: mod_base = OTHER; note = cytidine-3'-phosphate
  modified_base 17: mod_base = OTHER; note = cytidine-3'-phosphate
  modified_base 18: mod_base = OTHER; note = guanosine-3'-phosphate
  modified_base 19: mod_base = OTHER; note = uridine-3'-phosphate
  misc_feature 1..19: note = RNA
  misc_feature 20..21: note = DNA
ccacggtgctgtggaccgttt

SEQ ID NO: 936 - DNA, 21 bp, synthetic construct
  source 1..21: mol_type = other DNA
  modified_base 1: mod_base = OTHER; note = guanosine-3'-phosphate
  modified_base 2: mod_base = OTHER; note = guanosine-3'-phosphate
  modified_base 3: mod_base = OTHER; note = adenosine-3'-phosphate
  modified_base 4: mod_base = OTHER; note = cytidine-3'-phosphate
  modified_base 5: mod_base = OTHER; note = cytidine-3'-phosphate
  modified_base 6: mod_base = OTHER; note = guanosine-3'-phosphate
  modified_base 7: mod_base = OTHER; note = uridine-3'-phosphate
  modified_base 8: mod_base = OTHER; note = guanosine-3'-phosphate
  modified_base 9: mod_base = OTHER; note = uridine-3'-phosphate
  modified_base 10: mod_base = OTHER; note = uridine-3'-phosphate
  modified_base 11: mod_base = OTHER; note = cytidine-3'-phosphate
  modified_base 12: mod_base = OTHER; note = cytidine-3'-phosphate
  modified_base 13: mod_base = OTHER; note = uridine-3'-phosphate
  modified_base 14: mod_base = OTHER; note = guanosine-3'-phosphate
  modified_base 15: mod_base = OTHER; note = guanosine-3'-phosphate
  modified_base 16: mod_base = OTHER; note = guanosine-3'-phosphate
  modified_base 17: mod_base = OTHER; note = cytidine-3'-phosphate
  modified_base 18: mod_base = OTHER; note = adenosine-3'-phosphate
  modified_base 19: mod_base = OTHER; note = adenosine-3'-phosphate
  misc_feature 1..19: note = RNA
  misc_feature 20..21: note = DNA
ggaccgtgttcctgggcaatt

SEQ ID NO: 937 - DNA, 21 bp, synthetic construct
  source 1..21: mol_type = other DNA
  modified_base 1: mod_base = OTHER; note = uridine-3'-phosphate
  modified_base 2: mod_base = OTHER; note = cytidine-3'-phosphate
  modified_base 3: mod_base = OTHER; note = cytidine-3'-phosphate
  modified_base 4: mod_base = OTHER; note = uridine-3'-phosphate
  modified_base 5: mod_base = OTHER; note = guanosine-3'-phosphate
  modified_base 6: mod_base = OTHER; note = guanosine-3'-phosphate
  modified_base 7: mod_base = OTHER; note = guanosine-3'-phosphate
  modified_base 8: mod_base = OTHER; note = cytidine-3'-phosphate
  modified_base 9: mod_base = OTHER; note = adenosine-3'-phosphate
  modified_base 10: mod_base = OTHER; note = adenosine-3'-phosphate
  modified_base 11: mod_base = OTHER; note = guanosine-3'-phosphate
  modified_base 12: mod_base = OTHER; note = guanosine-3'-phosphate
  modified_base 13: mod_base = OTHER; note = uridine-3'-phosphate
  modified_base 14: mod_base = OTHER; note = guanosine-3'-phosphate
  modified_base 15: mod_base = OTHER; note = uridine-3'-phosphate
  modified_base 16: mod_base = OTHER; note = guanosine-3'-phosphate
  modified_base 17: mod_base = OTHER; note = guanosine-3'-phosphate
  modified_base 18: mod_base = OTHER; note = cytidine-3'-phosphate
  modified_base 19: mod_base = OTHER; note = adenosine-3'-phosphate
  misc_feature 1..19: note = RNA
  misc_feature 20..21: note = DNA
tcctgggcaaggtgtggcatt

SEQ ID NO: 938 - DNA, 21 bp, synthetic construct
  source 1..21: mol_type = other DNA
  modified_base 1: mod_base = OTHER; note = guanosine-3'-phosphate
  modified_base 2: mod_base = OTHER; note = uridine-3'-phosphate
  modified_base 3: mod_base = OTHER; note = guanosine-3'-phosphate
  modified_base 4: mod_base = OTHER; note = uridine-3'-phosphate
  modified_base 5: mod_base = OTHER; note = guanosine-3'-phosphate
  modified_base 6: mod_base = OTHER; note = guanosine-3'-phosphate
  modified_base 7: mod_base = OTHER; note = cytidine-3'-phosphate
  modified_base 8: mod_base = OTHER; note = adenosine-3'-phosphate
  modified_base 9: mod_base = OTHER; note = guanosine-3'-phosphate
  modified_base 10: mod_base = OTHER; note = adenosine-3'-phosphate
  modified_base 11: mod_base = OTHER; note = adenosine-3'-phosphate
  modified_base 12: mod_base = OTHER; note = cytidine-3'-phosphate
  modified_base 13: mod_base = OTHER; note = uridine-3'-phosphate
  modified_base 14: mod_base = OTHER; note = cytidine-3'-phosphate
  modified_base 15: mod_base = OTHER; note = guanosine-3'-phosphate
  modified_base 16: mod_base = OTHER; note = cytidine-3'-phosphate
  modified_base 17: mod_base = OTHER; note = guanosine-3'-phosphate
  modified_base 18: mod_base = OTHER; note = cytidine-3'-phosphate
  modified_base 19: mod_base = OTHER; note = uridine-3'-phosphate
  misc_feature 1..19: note = RNA
  misc_feature 20..21: note = DNA
gtgtggcagaactcgcgcttt

SEQ ID NO: 939 - DNA, 21 bp, synthetic construct
  source 1..21: mol_type = other DNA
  modified_base 1: mod_base = OTHER; note = guanosine-3'-phosphate
  modified_base 2: mod_base = OTHER; note = adenosine-3'-phosphate
  modified_base 3: mod_base = OTHER; note = adenosine-3'-phosphate
  modified_base 4: mod_base = OTHER; note = cytidine-3'-phosphate
  modified_base 5: mod_base = OTHER; note = uridine-3'-phosphate
  modified_base 6: mod_base = OTHER; note = cytidine-3'-phosphate
  modified_base 7: mod_base = OTHER; note = guanosine-3'-phosphate
  modified_base 8: mod_base = OTHER; note = cytidine-3'-phosphate
  modified_base 9: mod_base = OTHER; note = guanosine-3'-phosphate
  modified_base 10: mod_base = OTHER; note = cytidine-3'-phosphate
  modified_base 11: mod_base = OTHER; note = uridine-3'-phosphate
  modified_base 12: mod_base = OTHER; note = guanosine-3'-phosphate
  modified_base 13: mod_base = OTHER; note = guanosine-3'-phosphate
  modified_base 14: mod_base = OTHER; note = cytidine-3'-phosphate
  modified_base 15: mod_base = OTHER; note = cytidine-3'-phosphate
  modified_base 16: mod_base = OTHER; note = uridine-3'-phosphate
  modified_base 17: mod_base = OTHER; note = guanosine-3'-phosphate
  modified_base 18: mod_base = OTHER; note = guanosine-3'-phosphate
  modified_base 19: mod_base = OTHER; note = adenosine-3'-phosphate
  misc_feature 1..19: note = RNA
  misc_feature 20..21: note = DNA
gaactcgcgctggcctggatt

SEQ ID NO: 940 - DNA, 21 bp, synthetic construct
  source 1..21: mol_type = other DNA
  modified_base 1: mod_base = OTHER; note = guanosine-3'-phosphate
  modified_base 2: mod_base = OTHER; note = guanosine-3'-phosphate
  modified_base 3: mod_base = OTHER; note = cytidine-3'-phosphate
  modified_base 4: mod_base = OTHER; note = cytidine-3'-phosphate
  modified_base 5: mod_base = OTHER; note = uridine-3'-phosphate
  modified_base 6: mod_base = OTHER; note = guanosine-3'-phosphate
  modified_base 7: mod_base = OTHER; note = guanosine-3'-phosphate
  modified_base 8: mod_base = OTHER; note = adenosine-3'-phosphate
  modified_base 9: mod_base = OTHER; note = guanosine-3'-phosphate
  modified_base 10: mod_base = OTHER; note = adenosine-3'-phosphate
  modified_base 11: mod_base = OTHER; note = guanosine-3'-phosphate
  modified_base 12: mod_base = OTHER; note = guanosine-3'-phosphate
  modified_base 13: mod_base = OTHER; note = uridine-3'-phosphate
  modified_base 14: mod_base = OTHER; note = guanosine-3'-phosphate
  modified_base 15: mod_base = OTHER; note = uridine-3'-phosphate
  modified_base 16: mod_base = OTHER; note = cytidine-3'-phosphate
  modified_base 17: mod_base = OTHER; note = cytidine-3'-phosphate
  modified_base 18: mod_base = OTHER; note = uridine-3'-phosphate
  modified_base 19: mod_base = OTHER; note = uridine-3'-phosphate
  misc_feature 1..19: note = RNA
  misc_feature 20..21: note = DNA
ggcctggagaggtgtcctttt

SEQ ID NO: 941 - DNA, 21 bp, synthetic construct
  source 1..21: mol_type = other DNA
  modified_base 1: mod_base = OTHER; note = adenosine-3'-phosphate
  modified_base 2: mod_base = OTHER; note = guanosine-3'-phosphate
  modified_base 3: mod_base = OTHER; note = guanosine-3'-phosphate
  modified_base 4: mod_base = OTHER; note = uridine-3'-phosphate
  modified_base 5: mod_base = OTHER; note = guanosine-3'-phosphate
  modified_base 6: mod_base = OTHER; note = uridine-3'-phosphate
  modified_base 7: mod_base = OTHER; note = cytidine-3'-phosphate
  modified_base 8: mod_base = OTHER; note = cytidine-3'-phosphate
  modified_base 9: mod_base = OTHER; note = uridine-3'-phosphate
  modified_base 10: mod_base = OTHER; note = uridine-3'-phosphate
  modified_base 11: mod_base = OTHER; note = cytidine-3'-phosphate
  modified_base 12: mod_base = OTHER; note = adenosine-3'-phosphate
  modified_base 13: mod_base = OTHER; note = adenosine-3'-phosphate
  modified_base 14: mod_base = OTHER; note = guanosine-3'-phosphate
  modified_base 15: mod_base = OTHER; note = guanosine-3'-phosphate
  modified_base 16: mod_base = OTHER; note = uridine-3'-phosphate
  modified_base 17: mod_base = OTHER; note = guanosine-3'-phosphate
  modified_base 18: mod_base = OTHER; note = adenosine-3'-phosphate
  modified_base 19: mod_base = OTHER; note = guanosine-3'-phosphate
  misc_feature 1..19: note = RNA
  misc_feature 20..21: note = DNA
aggtgtccttcaaggtgagtt

SEQ ID NO: 942 - DNA, 21 bp, synthetic construct
  source 1..21: mol_type = other DNA
  modified_base 1: mod_base = OTHER; note = cytidine-3'-phosphate
  modified_base 2: mod_base = OTHER; note = adenosine-3'-phosphate
  modified_base 3: mod_base = OTHER; note = adenosine-3'-phosphate
  modified_base 4: mod_base = OTHER; note = guanosine-3'-phosphate
  modified_base 5: mod_base = OTHER; note = guanosine-3'-phosphate
  modified_base 6: mod_base = OTHER; note = uridine-3'-phosphate
  modified_base 7: mod_base = OTHER; note = guanosine-3'-phosphate
  modified_base 8: mod_base = OTHER; note = adenosine-3'-phosphate
  modified_base 9: mod_base = OTHER; note = guanosine-3'-phosphate
  modified_base 10: mod_base = OTHER; note = cytidine-3'-phosphate
  modified_base 11: mod_base = OTHER; note = cytidine-3'-phosphate
  modified_base 12: mod_base = OTHER; note = guanosine-3'-phosphate
  modified_base 13: mod_base = OTHER; note = cytidine-3'-phosphate
  modified_base 14: mod_base = OTHER; note = cytidine-3'-phosphate
  modified_base 15: mod_base = OTHER; note = uridine-3'-phosphate
  modified_base 16: mod_base = OTHER; note = guanosine-3'-phosphate
  modified_base 17: mod_base = OTHER; note = cytidine-3'-phosphate
  modified_base 18: mod_base = OTHER; note = uridine-3'-phosphate
  modified_base 19: mod_base = OTHER; note = cytidine-3'-phosphate
  misc_feature 1..19: note = RNA
  misc_feature 20..21: note = DNA
caaggtgagccgcctgctctt

SEQ ID NO: 943 - DNA, 21 bp, synthetic construct
  source 1..21: mol_type = other DNA
  modified_base 1: mod_base = OTHER; note = guanosine-3'-phosphate
  modified_base 2: mod_base = OTHER; note = cytidine-3'-phosphate
  modified_base 3: mod_base = OTHER; note = cytidine-3'-phosphate
  modified_base 4: mod_base = OTHER; note = uridine-3'-phosphate
  modified_base 5: mod_base = OTHER; note = guanosine-3'-phosphate
  modified_base 6: mod_base = OTHER; note = cytidine-3'-phosphate
  modified_base 7: mod_base = OTHER; note = uridine-3'-phosphate
  modified_base 8: mod_base = OTHER; note = cytidine-3'-phosphate
  modified_base 9: mod_base = OTHER; note = cytidine-3'-phosphate
  modified_base 10: mod_base = OTHER; note = uridine-3'-phosphate
  modified_base 11: mod_base = OTHER; note = guanosine-3'-phosphate
  modified_base 12: mod_base = OTHER; note = cytidine-3'-phosphate
  modified_base 13: mod_base = OTHER; note = adenosine-3'-phosphate
  modified_base 14: mod_base = OTHER; note = cytidine-3'-phosphate
  modified_base 15: mod_base = OTHER; note = cytidine-3'-phosphate
  modified_base 16: mod_base = OTHER; note = cytidine-3'-phosphate
  modified_base 17: mod_base = OTHER; note = guanosine-3'-phosphate
  modified_base 18: mod_base = OTHER; note = uridine-3'-phosphate
  modified_base 19: mod_base = OTHER; note = adenosine-3'-phosphate
  misc_feature 1..19: note = RNA
  misc_feature 20..21: note = DNA
gcctgctcctgcacccgtatt

SEQ ID NO: 944 - DNA, 21 bp, synthetic construct
  source 1..21: mol_type = other DNA
  modified_base 1: mod_base = OTHER; note = guanosine-3'-phosphate
  modified_base 2: mod_base = OTHER; note = cytidine-3'-phosphate
  modified_base 3: mod_base = OTHER; note = adenosine-3'-phosphate
  modified_base 4: mod_base = OTHER; note = cytidine-3'-phosphate
  modified_base 5: mod_base = OTHER; note = cytidine-3'-phosphate
  modified_base 6: mod_base = OTHER; note = cytidine-3'-phosphate
  modified_base 7: mod_base = OTHER; note = guanosine-3'-phosphate
  modified_base 8: mod_base = OTHER; note = uridine-3'-phosphate
  modified_base 9: mod_base = OTHER; note = adenosine-3'-phosphate
  modified_base 10: mod_base = OTHER; note = cytidine-3'-phosphate
  modified_base 11: mod_base = OTHER; note = cytidine-3'-phosphate
  modified_base 12: mod_base = OTHER; note = adenosine-3'-phosphate
  modified_base 13: mod_base = OTHER; note = cytidine-3'-phosphate
  modified_base 14: mod_base = OTHER; note = guanosine-3'-phosphate
  modified_base 15: mod_base = OTHER; note = adenosine-3'-phosphate
  modified_base 16: mod_base = OTHER; note = adenosine-3'-phosphate
  modified_base 17: mod_base = OTHER; note = guanosine-3'-phosphate
  modified_base 18: mod_base = OTHER; note = adenosine-3'-phosphate
  modified_base 19: mod_base = OTHER; note = guanosine-3'-phosphate
  misc_feature 1..19: note = RNA
  misc_feature 20..21: note = DNA
gcacccgtaccacgaagagtt

SEQ ID NO: 945 - DNA, 21 bp, synthetic construct
  source 1..21: mol_type = other DNA
  modified_base 1: mod_base = OTHER; note = cytidine-3'-phosphate
  modified_base 2: mod_base = OTHER; note = cytidine-3'-phosphate
  modified_base 3: mod_base = OTHER; note = adenosine-3'-phosphate
  modified_base 4: mod_base = OTHER; note = cytidine-3'-phosphate
  modified_base 5: mod_base = OTHER; note = guanosine-3'-phosphate
  modified_base 6: mod_base = OTHER; note = adenosine-3'-phosphate
  modified_base 7: mod_base = OTHER; note = adenosine-3'-phosphate
  modified_base 8: mod_base = OTHER; note = guanosine-3'-phosphate
  modified_base 9: mod_base = OTHER; note = adenosine-3'-phosphate
  modified_base 10: mod_base = OTHER; note = guanosine-3'-phosphate
  modified_base 11: mod_base = OTHER; note = guanosine-3'-phosphate
  modified_base 12: mod_base = OTHER; note = adenosine-3'-phosphate
  modified_base 13: mod_base = OTHER; note = cytidine-3'-phosphate
  modified_base 14: mod_base = OTHER; note = adenosine-3'-phosphate
  modified_base 15: mod_base = OTHER; note = guanosine-3'-phosphate
  modified_base 16: mod_base = OTHER; note = cytidine-3'-phosphate
  modified_base 17: mod_base = OTHER; note = cytidine-3'-phosphate
  modified_base 18: mod_base = OTHER; note = adenosine-3'-phosphate
  modified_base 19: mod_base = OTHER; note = uridine-3'-phosphate
  misc_feature 1..19: note = RNA
  misc_feature 20..21: note = DNA
ccacgaagaggacagccattt

SEQ ID NO: 946 - DNA, 21 bp, synthetic construct
  source 1..21: mol_type = other DNA
  modified_base 1: mod_base = OTHER; note = adenosine-3'-phosphate
  modified_base 2: mod_base = OTHER; note = guanosine-3'-phosphate
  modified_base 3: mod_base = OTHER; note = guanosine-3'-phosphate
  modified_base 4: mod_base = OTHER; note = adenosine-3'-phosphate
  modified_base 5: mod_base = OTHER; note = cytidine-3'-phosphate
  modified_base 6: mod_base = OTHER; note = adenosine-3'-phosphate
  modified_base 7: mod_base = OTHER; note = guanosine-3'-phosphate
  modified_base 8: mod_base = OTHER; note = cytidine-3'-phosphate
  modified_base 9: mod_base = OTHER; note = cytidine-3'-phosphate
  modified_base 10: mod_base = OTHER; note = adenosine-3'-phosphate
  modified_base 11: mod_base = OTHER; note = uridine-3'-phosphate
  modified_base 12: mod_base = OTHER; note = guanosine-3'-phosphate
  modified_base 13: mod_base = OTHER; note = adenosine-3'-phosphate
  modified_base 14: mod_base = OTHER; note = cytidine-3'-phosphate
  modified_base 15: mod_base = OTHER; note = uridine-3'-phosphate
  modified_base 16: mod_base = OTHER; note = adenosine-3'-phosphate
  modified_base 17: mod_base = OTHER; note = cytidine-3'-phosphate
  modified_base 18: mod_base = OTHER; note = guanosine-3'-phosphate
  modified_base 19: mod_base = OTHER; note = adenosine-3'-phosphate
  misc_feature 1..19: note = RNA
  misc_feature 20..21: note = DNA
aggacagccatgactacgatt

SEQ ID NO: 947 - DNA, 21 bp, synthetic construct
  source 1..21: mol_type = other DNA
  modified_base 1: mod_base = OTHER; note = adenosine-3'-phosphate
  modified_base 2: mod_base = OTHER; note = cytidine-3'-phosphate
  modified_base 3: mod_base = OTHER; note = uridine-3'-phosphate
  modified_base 4: mod_base = OTHER; note = adenosine-3'-phosphate
  modified_base 5: mod_base = OTHER; note = cytidine-3'-phosphate
  modified_base 6: mod_base = OTHER; note = guanosine-3'-phosphate
  modified_base 7: mod_base = OTHER; note = adenosine-3'-phosphate
  modified_base 8: mod_base = OTHER; note = cytidine-3'-phosphate
  modified_base 9: mod_base = OTHER; note = guanosine-3'-phosphate
  modified_base 10: mod_base = OTHER; note = uridine-3'-phosphate
  modified_base 11: mod_base = OTHER; note = guanosine-3'-phosphate
  modified_base 12: mod_base = OTHER; note = guanosine-3'-phosphate
  modified_base 13: mod_base = OTHER; note = cytidine-3'-phosphate
  modified_base 14: mod_base = OTHER; note = guanosine-3'-phosphate
  modified_base 15: mod_base = OTHER; note = cytidine-3'-phosphate
  modified_base 16: mod_base = OTHER; note = uridine-3'-phosphate
  modified_base 17: mod_base = OTHER; note = guanosine-3'-phosphate
  modified_base 18: mod_base = OTHER; note = cytidine-3'-phosphate
  modified_base 19: mod_base = OTHER; note = uridine-3'-phosphate
  misc_feature 1..19: note = RNA
  misc_feature 20..21: note = DNA
actacgacgtggcgctgcttt

SEQ ID NO: 948 - DNA, 21 bp, synthetic construct
  source 1..21: mol_type = other DNA
  modified_base 1: mod_base = OTHER; note = uridine-3'-phosphate
  modified_base 2: mod_base = OTHER; note = guanosine-3'-phosphate
  modified_base 3: mod_base = OTHER; note = guanosine-3'-phosphate
  modified_base 4: mod_base = OTHER; note = cytidine-3'-phosphate
  modified_base 5: mod_base = OTHER; note = guanosine-3'-phosphate
  modified_base 6: mod_base = OTHER; note = cytidine-3'-phosphate
  modified_base 7: mod_base = OTHER; note = uridine-3'-phosphate
  modified_base 8: mod_base = OTHER; note = guanosine-3'-phosphate
  modified_base 9: mod_base = OTHER; note = cytidine-3'-phosphate
  modified_base 10: mod_base = OTHER; note = uridine-3'-phosphate
  modified_base 11: mod_base = OTHER; note = guanosine-3'-phosphate
  modified_base 12: mod_base = OTHER; note = cytidine-3'-phosphate
  modified_base 13: mod_base = OTHER; note = adenosine-3'-phosphate
  modified_base 14: mod_base = OTHER; note = guanosine-3'-phosphate
  modified_base 15: mod_base = OTHER; note = cytidine-3'-phosphate
  modified_base 16: mod_base = OTHER; note = uridine-3'-phosphate
  modified_base 17: mod_base = OTHER; note = cytidine-3'-phosphate
  modified_base 18: mod_base = OTHER; note = guanosine-3'-phosphate
  modified_base 19: mod_base = OTHER; note = adenosine-3'-phosphate
  misc_feature 1..19: note = RNA
  misc_feature 20..21: note = DNA
tggcgctgctgcagctcgatt

SEQ ID NO: 949 - DNA, 21 bp, synthetic construct
  source 1..21: mol_type = other DNA
  modified_base 1: mod_base = OTHER; note = adenosine-3'-phosphate
  modified_base 2: mod_base = OTHER; note = guanosine-3'-phosphate
  modified_base 3: mod_base = OTHER; note = cytidine-3'-phosphate
  modified_base 4: mod_base = OTHER; note = uridine-3'-phosphate
  modified_base 5: mod_base = OTHER; note = cytidine-3'-phosphate
  modified_base 6: mod_base = OTHER; note = guanosine-3'-phosphate
  modified_base 7: mod_base = OTHER; note = adenosine-3'-phosphate
  modified_base 8: mod_base = OTHER; note = cytidine-3'-phosphate
  modified_base 9: mod_base = OTHER; note = cytidine-3'-phosphate
  modified_base 10: mod_base = OTHER; note = adenosine-3'-phosphate
  modified_base 11: mod_base = OTHER; note = cytidine-3'-phosphate
  modified_base 12: mod_base = OTHER; note = cytidine-3'-phosphate
  modified_base 13: mod_base = OTHER; note = cytidine-3'-phosphate
  modified_base 14: mod_base = OTHER; note = guanosine-3'-phosphate
  modified_base 15: mod_base = OTHER; note = guanosine-3'-phosphate
  modified_base 16: mod_base = OTHER; note = uridine-3'-phosphate
  modified_base 17: mod_base = OTHER; note = guanosine-3'-phosphate
  modified_base 18: mod_base = OTHER; note = guanosine-3'-phosphate
  modified_base 19: mod_base = OTHER; note = uridine-3'-phosphate
  misc_feature 1..19: note = RNA
  misc_feature 20..21: note = DNA
agctcgaccacccggtggttt

SEQ ID NO: 950 - DNA, 21 bp, synthetic construct
  source 1..21: mol_type = other DNA
  modified_base 1: mod_base = OTHER; note = cytidine-3'-phosphate
  modified_base 2: mod_base = OTHER; note = cytidine-3'-phosphate
  modified_base 3: mod_base = OTHER; note = guanosine-3'-phosphate
  modified_base 4: mod_base = OTHER; note = guanosine-3'-phosphate
  modified_base 5: mod_base = OTHER; note = uridine-3'-phosphate
  modified_base 6: mod_base = OTHER; note = guanosine-3'-phosphate
  modified_base 7: mod_base = OTHER; note = guanosine-3'-phosphate
  modified_base 8: mod_base = OTHER; note = uridine-3'-phosphate
  modified_base 9: mod_base = OTHER; note = guanosine-3'-phosphate
  modified_base 10: mod_base = OTHER; note = cytidine-3'-phosphate
  modified_base 11: mod_base = OTHER; note = guanosine-3'-phosphate
  modified_base 12: mod_base = OTHER; note = cytidine-3'-phosphate
  modified_base 13: mod_base = OTHER; note = uridine-3'-phosphate
  modified_base 14: mod_base = OTHER; note = cytidine-3'-phosphate
  modified_base 15: mod_base = OTHER; note = guanosine-3'-phosphate
  modified_base 16: mod_base = OTHER; note = guanosine-3'-phosphate
  modified_base 17: mod_base = OTHER; note = cytidine-3'-phosphate
  modified_base 18: mod_base = OTHER; note = cytidine-3'-phosphate
  modified_base 19: mod_base = OTHER; note = guanosine-3'-phosphate
  misc_feature 1..19: note = RNA
  misc_feature 20..21: note = DNA
ccggtggtgcgctcggccgtt

SEQ ID NO: 951 - DNA, 21 bp, synthetic construct
  source 1..21: mol_type = other DNA
  modified_base 1: mod_base = OTHER; note = uridine-3'-phosphate
  modified_base 2: mod_base = OTHER; note = guanosine-3'-phosphate
  modified_base 3: mod_base = OTHER; note = cytidine-3'-phosphate
  modified_base 4: mod_base = OTHER; note = guanosine-3'-phosphate
  modified_base 5: mod_base = OTHER; note = cytidine-3'-phosphate
  modified_base 6: mod_base = OTHER; note = uridine-3'-phosphate
  modified_base 7: mod_base = OTHER; note = cytidine-3'-phosphate
  modified_base 8: mod_base = OTHER; note = guanosine-3'-phosphate
  modified_base 9: mod_base = OTHER; note = guanosine-3'-phosphate
  modified_base 10: mod_base = OTHER; note = cytidine-3'-phosphate
  modified_base 11: mod_base = OTHER; note = cytidine-3'-phosphate
  modified_base 12: mod_base = OTHER; note = guanosine-3'-phosphate
  modified_base 13: mod_base = OTHER; note = cytidine-3'-phosphate
  modified_base 14: mod_base = OTHER; note = cytidine-3'-phosphate
  modified_base 15: mod_base = OTHER; note = guanosine-3'-phosphate
  modified_base 16: mod_base = OTHER; note = uridine-3'-phosphate
  modified_base 17: mod_base = OTHER; note = guanosine-3'-phosphate
  modified_base 18: mod_base = OTHER; note = cytidine-3'-phosphate
  modified_base 19: mod_base = OTHER; note = guanosine-3'-phosphate
  misc_feature 1..19: note = RNA
  misc_feature 20..21: note = DNA
tgcgctcggccgccgtgcgtt

SEQ ID NO: 952 - DNA, 21 bp, synthetic construct
  source 1..21: mol_type = other DNA
  modified_base 1: mod_base = OTHER; note = cytidine-3'-phosphate
  modified_base 2: mod_base = OTHER; note = cytidine-3'-phosphate
  modified_base 3: mod_base = OTHER; note = guanosine-3'-phosphate
  modified_base 4: mod_base = OTHER; note = uridine-3'-phosphate
  modified_base 5: mod_base = OTHER; note = guanosine-3'-phosphate
  modified_base 6: mod_base = OTHER; note = cytidine-3'-phosphate
  modified_base 7: mod_base = OTHER; note = guanosine-3'-phosphate
  modified_base 8: mod_base = OTHER; note = cytidine-3'-phosphate
  modified_base 9: mod_base = OTHER; note = cytidine-3'-phosphate
  modified_base 10: mod_base = OTHER; note = cytidine-3'-phosphate
  modified_base 11: mod_base = OTHER; note = cytidine-3'-phosphate
  modified_base 12: mod_base = OTHER; note = guanosine-3'-phosphate
  modified_base 13: mod_base = OTHER; note = uridine-3'-phosphate
  modified_base 14: mod_base = OTHER; note = cytidine-3'-phosphate
  modified_base 15: mod_base = OTHER; note = uridine-3'-phosphate
  modified_base 16: mod_base = OTHER; note = guanosine-3'-phosphate
  modified_base 17: mod_base = OTHER; note = cytidine-3'-phosphate
  modified_base 18: mod_base = OTHER; note = cytidine-3'-phosphate
  modified_base 19: mod_base = OTHER; note = uridine-3'-phosphate
  misc_feature 1..19: note = RNA
  misc_feature 20..21: note = DNA
ccgtgcgccccgtctgccttt

SEQ ID NO: 953 - DNA, 21 bp, synthetic construct
  source 1..21: mol_type = other DNA
  modified_base 1: mod_base = OTHER; note = cytidine-3'-phosphate
  modified_base 2: mod_base = OTHER; note = cytidine-3'-phosphate
  modified_base 3: mod_base = OTHER; note = guanosine-3'-phosphate
  modified_base 4: mod_base = OTHER; note = uridine-3'-phosphate
  modified_base 5: mod_base = OTHER; note = cytidine-3'-phosphate
  modified_base 6: mod_base = OTHER; note = uridine-3'-phosphate
  modified_base 7: mod_base = OTHER; note = guanosine-3'-phosphate
  modified_base 8: mod_base = OTHER; note = cytidine-3'-phosphate
  modified_base 9: mod_base = OTHER; note = cytidine-3'-phosphate
  modified_base 10: mod_base = OTHER; note = uridine-3'-phosphate
  modified_base 11: mod_base = OTHER; note = guanosine-3'-phosphate
  modified_base 12: mod_base = OTHER; note = cytidine-3'-phosphate
  modified_base 13: mod_base = OTHER; note = cytidine-3'-phosphate
  modified_base 14: mod_base = OTHER; note = cytidine-3'-phosphate
  modified_base 15: mod_base = OTHER; note = guanosine-3'-phosphate
  modified_base 16: mod_base = OTHER; note = cytidine-3'-phosphate
  modified_base 17: mod_base = OTHER; note = guanosine-3'-phosphate
  modified_base 18: mod_base = OTHER; note = cytidine-3'-phosphate
  modified_base 19: mod_base = OTHER; note = guanosine-3'-phosphate
  misc_feature 1..19: note = RNA
  misc_feature 20..21: note = DNA
ccgtctgcctgcccgcgcgtt

SEQ ID NO: 954 - DNA, 21 bp, synthetic construct
  source 1..21: mol_type = other DNA
  modified_base 1: mod_base = OTHER; note = cytidine-3'-phosphate
  modified_base 2: mod_base = OTHER; note = cytidine-3'-phosphate
  modified_base 3: mod_base = OTHER; note = guanosine-3'-phosphate
  modified_base 4: mod_base = OTHER; note = cytidine-3'-phosphate
  modified_base 5: mod_base = OTHER; note = guanosine-3'-phosphate
  modified_base 6: mod_base = OTHER; note = cytidine-3'-phosphate
  modified_base 7: mod_base = OTHER; note = guanosine-3'-phosphate
  modified_base 8: mod_base = OTHER; note = cytidine-3'-phosphate
  modified_base 9: mod_base = OTHER; note = uridine-3'-phosphate
  modified_base 10: mod_base = OTHER; note = cytidine-3'-phosphate
  modified_base 11: mod_base = OTHER; note = cytidine-3'-phosphate
  modified_base 12: mod_base = OTHER; note = cytidine-3'-phosphate
  modified_base 13: mod_base = OTHER; note = adenosine-3'-phosphate
  modified_base 14: mod_base = OTHER; note = cytidine-3'-phosphate
  modified_base 15: mod_base = OTHER; note = uridine-3'-phosphate
  modified_base 16: mod_base = OTHER; note = uridine-3'-phosphate
  modified_base 17: mod_base = OTHER; note = cytidine-3'-phosphate
  modified_base 18: mod_base = OTHER; note = uridine-3'-phosphate
  modified_base 19: mod_base = OTHER; note = uridine-3'-phosphate
  misc_feature 1..19: note = RNA
  misc_feature 20..21: note = DNA
ccgcgcgctcccacttctttt

SEQ ID NO: 955 - DNA, 21 bp, synthetic construct
  source 1..21: mol_type = other DNA
  modified_base 1: mod_base = OTHER; note = cytidine-3'-phosphate
  modified_base 2: mod_base = OTHER; note = cytidine-3'-phosphate
  modified_base 3: mod_base = OTHER; note = cytidine-3'-phosphate
  modified_base 4: mod_base = OTHER; note = adenosine-3'-phosphate
  modified_base 5: mod_base = OTHER; note = cytidine-3'-phosphate
  modified_base 6: mod_base = OTHER; note = uridine-3'-phosphate
  modified_base 7: mod_base = OTHER; note = uridine-3'-phosphate
  modified_base 8: mod_base = OTHER; note = cytidine-3'-phosphate
  modified_base 9: mod_base = OTHER; note = uridine-3'-phosphate
  modified_base 10: mod_base = OTHER; note = uridine-3'-phosphate
  modified_base 11: mod_base = OTHER; note = cytidine-3'-phosphate
  modified_base 12: mod_base = OTHER; note = guanosine-3'-phosphate
  modified_base 13: mod_base = OTHER; note = adenosine-3'-phosphate
  modified_base 14: mod_base = OTHER; note = guanosine-3'-phosphate
  modified_base 15: mod_base = OTHER; note = cytidine-3'-phosphate
  modified_base 16: mod_base = OTHER; note = cytidine-3'-phosphate
  modified_base 17: mod_base = OTHER; note = cytidine-3'-phosphate
  modified_base 18: mod_base = OTHER; note = guanosine-3'-phosphate
  modified_base 19: mod_base = OTHER; note = guanosine-3'-phosphate
  misc_feature 1..19: note = RNA
  misc_feature 20..21: note = DNA
cccacttcttcgagcccggtt

SEQ ID NO: 956 - DNA, 21 bp, synthetic construct
  source 1..21: mol_type = other DNA
  modified_base 1: mod_base = OTHER; note = guanosine-3'-phosphate
  modified_base 2: mod_base = OTHER; note = adenosine-3'-phosphate
  modified_base 3: mod_base = OTHER; note = guanosine-3'-phosphate
  modified_base 4: mod_base = OTHER; note = cytidine-3'-phosphate
  modified_base 5: mod_base = OTHER; note = cytidine-3'-phosphate
  modified_base 6: mod_base = OTHER; note = cytidine-3'-phosphate
  modified_base 7: mod_base = OTHER; note = guanosine-3'-phosphate
  modified_base 8: mod_base = OTHER; note = guanosine-3'-phosphate
  modified_base 9: mod_base = OTHER; note = cytidine-3'-phosphate
  modified_base 10: mod_base = OTHER; note = cytidine-3'-phosphate
  modified_base 11: mod_base = OTHER; note = uridine-3'-phosphate
  modified_base 12: mod_base = OTHER; note = guanosine-3'-phosphate
  modified_base 13: mod_base = OTHER; note = cytidine-3'-phosphate
  modified_base 14: mod_base = OTHER; note = adenosine-3'-phosphate
  modified_base 15: mod_base = OTHER; note = cytidine-3'-phosphate
  modified_base 16: mod_base = OTHER; note = uridine-3'-phosphate
  modified_base 17: mod_base = OTHER; note = guanosine-3'-phosphate
  modified_base 18: mod_base = OTHER; note = cytidine-3'-phosphate
  modified_base 19: mod_base = OTHER; note = uridine-3'-phosphate
  misc_feature 1..19: note = RNA
  misc_feature 20..21: note = DNA
gagcccggcctgcactgcttt

SEQ ID NO: 957 - DNA, 21 bp, synthetic construct
  source 1..21: mol_type = other DNA
  modified_base 1: mod_base = OTHER; note = guanosine-3'-phosphate
  modified_base 2: mod_base = OTHER; note = guanosine-3'-phosphate
  modified_base 3: mod_base = OTHER; note = cytidine-3'-phosphate
  modified_base 4: mod_base = OTHER; note = cytidine-3'-phosphate
  modified_base 5: mod_base = OTHER; note = uridine-3'-phosphate
  modified_base 6: mod_base = OTHER; note = guanosine-3'-phosphate
  modified_base 7: mod_base = OTHER; note = cytidine-3'-phosphate
  modified_base 8: mod_base = OTHER; note = adenosine-3'-phosphate
  modified_base 9: mod_base = OTHER; note = cytidine-3'-phosphate
  modified_base 10: mod_base = OTHER; note = uridine-3'-phosphate
  modified_base 11: mod_base = OTHER; note = guanosine-3'-phosphate
  modified_base 12: mod_base = OTHER; note = cytidine-3'-phosphate
  modified_base 13: mod_base = OTHER; note = uridine-3'-phosphate
  modified_base 14: mod_base = OTHER; note = guanosine-3'-phosphate
  modified_base 15: mod_base = OTHER; note = guanosine-3'-phosphate
  modified_base 16: mod_base = OTHER; note = adenosine-3'-phosphate
  modified_base 17: mod_base = OTHER; note = uridine-3'-phosphate
  modified_base 18: mod_base = OTHER; note = uridine-3'-phosphate
  modified_base 19: mod_base = OTHER; note = adenosine-3'-phosphate
  misc_feature 1..19: note = RNA
  misc_feature 20..21: note = DNA
ggcctgcactgctggattatt

SEQ ID NO: 958 - DNA, 21 bp, synthetic construct
  source 1..21: mol_type = other DNA
  modified_base 1: mod_base = OTHER; note = uridine-3'-phosphate
  modified_base 2: mod_base = OTHER; note = guanosine-3'-phosphate
  modified_base 3: mod_base = OTHER; note = guanosine-3'-phosphate
  modified_base 4: mod_base = OTHER; note = adenosine-3'-phosphate
  modified_base 5: mod_base = OTHER; note = uridine-3'-phosphate
  modified_base 6: mod_base = OTHER; note = uridine-3'-phosphate
  modified_base 7: mod_base = OTHER; note = adenosine-3'-phosphate
  modified_base 8: mod_base = OTHER; note = cytidine-3'-phosphate
  modified_base 9: mod_base = OTHER; note = guanosine-3'-phosphate
  modified_base 10: mod_base = OTHER; note = guanosine-3'-phosphate
  modified_base 11: mod_base = OTHER; note = guanosine-3'-phosphate
  modified_base 12: mod_base = OTHER; note = cytidine-3'-phosphate
  modified_base 13: mod_base = OTHER; note = uridine-3'-phosphate
  modified_base 14: mod_base = OTHER; note = guanosine-3'-phosphate
  modified_base 15: mod_base = OTHER; note = guanosine-3'-phosphate
  modified_base 16: mod_base = OTHER; note = guanosine-3'-phosphate
  modified_base 17: mod_base = OTHER; note = guanosine-3'-phosphate
  modified_base 18: mod_base = OTHER; note = cytidine-3'-phosphate
  modified_base 19: mod_base = OTHER; note = guanosine-3'-phosphate
  misc_feature 1..19: note = RNA
  misc_feature 20..21: note = DNA
tggattacgggctggggcgtt

SEQ ID NO: 959 - DNA, 21 bp, synthetic construct
  source 1..21: mol_type = other DNA
  modified_base 1: mod_base = OTHER; note = guanosine-3'-phosphate
  modified_base 2: mod_base = OTHER; note = cytidine-3'-phosphate
  modified_base 3: mod_base = OTHER; note = uridine-3'-phosphate
  modified_base 4: mod_base = OTHER; note = guanosine-3'-phosphate
  modified_base 5: mod_base = OTHER; note = guanosine-3'-phosphate
  modified_base 6: mod_base = OTHER; note = guanosine-3'-phosphate
  modified_base 7: mod_base = OTHER; note = guanosine-3'-phosphate
  modified_base 8: mod_base = OTHER; note = cytidine-3'-phosphate
  modified_base 9: mod_base = OTHER; note = guanosine-3'-phosphate
  modified_base 10: mod_base = OTHER; note = cytidine-3'-phosphate
  modified_base 11: mod_base = OTHER; note = cytidine-3'-phosphate
  modified_base 12: mod_base = OTHER; note = uridine-3'-phosphate
  modified_base 13: mod_base = OTHER; note = uridine-3'-phosphate
  modified_base 14: mod_base = OTHER; note = guanosine-3'-phosphate
  modified_base 15: mod_base = OTHER; note = cytidine-3'-phosphate
  modified_base 16: mod_base = OTHER; note = guanosine-3'-phosphate
  modified_base 17: mod_base = OTHER; note = cytidine-3'-phosphate
  modified_base 18: mod_base = OTHER; note = guanosine-3'-phosphate
  modified_base 19: mod_base = OTHER; note = adenosine-3'-phosphate
  misc_feature 1..19: note = RNA
  misc_feature 20..21: note = DNA
gctggggcgccttgcgcgatt

SEQ ID NO: 960 - DNA, 21 bp, synthetic construct
  source 1..21: mol_type = other DNA
  modified_base 1: mod_base = OTHER; note = uridine-3'-phosphate
  modified_base 2: mod_base = OTHER; note = guanosine-3'-phosphate
  modified_base 3: mod_base = OTHER; note = cytidine-3'-phosphate
  modified_base 4: mod_base = OTHER; note = guanosine-3'-phosphate
  modified_base 5: mod_base = OTHER; note = cytidine-3'-phosphate
  modified_base 6: mod_base = OTHER; note = guanosine-3'-phosphate
  modified_base 7: mod_base = OTHER; note = adenosine-3'-phosphate
  modified_base 8: mod_base = OTHER; note = guanosine-3'-phosphate
  modified_base 9: mod_base = OTHER; note = guanosine-3'-phosphate
  modified_base 10: mod_base = OTHER; note = guanosine-3'-phosphate
  modified_base 11: mod_base = OTHER; note = cytidine-3'-phosphate
  modified_base 12: mod_base = OTHER; note = guanosine-3'-phosphate
  modified_base 13: mod_base = OTHER; note = guanosine-3'-phosphate
  modified_base 14: mod_base = OTHER; note = cytidine-3'-phosphate
  modified_base 15: mod_base = OTHER; note = cytidine-3'-phosphate
  modified_base 16: mod_base = OTHER; note = cytidine-3'-phosphate
  modified_base 17: mod_base = OTHER; note = cytidine-3'-phosphate
  modified_base 18: mod_base = OTHER; note = adenosine-3'-phosphate
  modified_base 19: mod_base = OTHER; note = uridine-3'-phosphate
  misc_feature 1..19: note = RNA
  misc_feature 20..21: note = DNA
tgcgcgagggcggccccattt

SEQ ID NO: 961 - DNA, 21 bp, synthetic construct
  source 1..21: mol_type = other DNA
  modified_base 1: mod_base = OTHER; note = adenosine-3'-phosphate
  modified_base 2: mod_base = OTHER; note = guanosine-3'-phosphate
  modified_base 3: mod_base = OTHER; note = guanosine-3'-phosphate
  modified_base 4: mod_base = OTHER; note = guanosine-3'-phosphate
  modified_base 5: mod_base = OTHER; note = cytidine-3'-phosphate
  modified_base 6: mod_base = OTHER; note = guanosine-3'-phosphate
  modified_base 7: mod_base = OTHER; note = guanosine-3'-phosphate
  modified_base 8: mod_base = OTHER; note = cytidine-3'-phosphate
  modified_base 9: mod_base = OTHER; note = cytidine-3'-phosphate
  modified_base 10: mod_base = OTHER; note = cytidine-3'-phosphate
  modified_base 11: mod_base = OTHER; note = cytidine-3'-phosphate
  modified_base 12: mod_base = OTHER; note = adenosine-3'-phosphate
  modified_base 13: mod_base = OTHER; note = uridine-3'-phosphate
  modified_base 14: mod_base = OTHER; note = cytidine-3'-phosphate
  modified_base 15: mod_base = OTHER; note = adenosine-3'-phosphate
  modified_base 16: mod_base = OTHER; note = guanosine-3'-phosphate
  modified_base 17: mod_base = OTHER; note = cytidine-3'-phosphate
  modified_base 18: mod_base = OTHER; note = adenosine-3'-phosphate
  modified_base 19: mod_base = OTHER; note = adenosine-3'-phosphate
  misc_feature 1..19: note = RNA
  misc_feature 20..21: note = DNA
agggcggccccatcagcaatt

SEQ ID NO: 962 - DNA, 21 bp, synthetic construct
  source 1..21: mol_type = other DNA
  modified_base 1: mod_base = OTHER; note = uridine-3'-phosphate
  modified_base 2: mod_base = OTHER; note = cytidine-3'-phosphate
  modified_base 3: mod_base = OTHER; note = adenosine-3'-phosphate
  modified_base 4: mod_base = OTHER; note = guanosine-3'-phosphate
  modified_base 5: mod_base = OTHER; note = cytidine-3'-phosphate
  modified_base 6: mod_base = OTHER; note = adenosine-3'-phosphate
  modified_base 7: mod_base = OTHER; note = adenosine-3'-phosphate
  modified_base 8: mod_base = OTHER; note = cytidine-3'-phosphate
  modified_base 9: mod_base = OTHER; note = guanosine-3'-phosphate
  modified_base 10: mod_base = OTHER; note = cytidine-3'-phosphate
  modified_base 11: mod_base = OTHER; note = uridine-3'-phosphate
  modified_base 12: mod_base = OTHER; note = cytidine-3'-phosphate
  modified_base 13: mod_base = OTHER; note = uridine-3'-phosphate
  modified_base 14: mod_base = OTHER; note = guanosine-3'-phosphate
  modified_base 15: mod_base = OTHER; note = cytidine-3'-phosphate
  modified_base 16: mod_base = OTHER; note = adenosine-3'-phosphate
  modified_base 17: mod_base = OTHER; note = guanosine-3'-phosphate
  modified_base 18: mod_base = OTHER; note = adenosine-3'-phosphate
  modified_base 19: mod_base = OTHER; note = adenosine-3'-phosphate
  misc_feature 1..19: note = RNA
  misc_feature 20..21: note = DNA
tcagcaacgctctgcagaatt

SEQ ID NO: 963 - DNA, 21 bp, synthetic construct
  source 1..21: mol_type = other DNA
  modified_base 1: mod_base = OTHER; note = uridine-3'-phosphate
  modified_base 2: mod_base = OTHER; note = guanosine-3'-phosphate
  modified_base 3: mod_base = OTHER; note = cytidine-3'-phosphate
  modified_base 4: mod_base = OTHER; note = adenosine-3'-phosphate
  modified_base 5: mod_base = OTHER; note = guanosine-3'-phosphate
  modified_base 6: mod_base = OTHER; note = adenosine-3'-phosphate
  modified_base 7: mod_base = OTHER; note = adenosine-3'-phosphate
  modified_base 8: mod_base = OTHER; note = adenosine-3'-phosphate
  modified_base 9: mod_base = OTHER; note = guanosine-3'-phosphate
  modified_base 10: mod_base = OTHER; note = uridine-3'-phosphate
  modified_base 11: mod_base = OTHER; note = guanosine-3'-phosphate
  modified_base 12: mod_base = OTHER; note = guanosine-3'-phosphate
  modified_base 13: mod_base = OTHER; note = adenosine-3'-phosphate
  modified_base 14: mod_base = OTHER; note = uridine-3'-phosphate
  modified_base 15: mod_base = OTHER; note = guanosine-3'-phosphate
  modified_base 16: mod_base = OTHER; note = uridine-3'-phosphate
  modified_base 17: mod_base = OTHER; note = guanosine-3'-phosphate
  modified_base 18: mod_base = OTHER; note = cytidine-3'-phosphate
  modified_base 19: mod_base = OTHER; note = adenosine-3'-phosphate
  misc_feature 1..19: note = RNA
  misc_feature 20..21: note = DNA
tgcagaaagtggatgtgcatt

SEQ ID NO: 964 - DNA, 21 bp, synthetic construct
  source 1..21: mol_type = other DNA
  modified_base 1: mod_base = OTHER; note = adenosine-3'-phosphate
  modified_base 2: mod_base = OTHER; note = adenosine-3'-phosphate
  modified_base 3: mod_base = OTHER; note = guanosine-3'-phosphate
  modified_base 4: mod_base = OTHER; note = uridine-3'-phosphate
  modified_base 5: mod_base = OTHER; note = guanosine-3'-phosphate
  modified_base 6: mod_base = OTHER; note = guanosine-3'-phosphate
  modified_base 7: mod_base = OTHER; note = adenosine-3'-phosphate
  modified_base 8: mod_base = OTHER; note = uridine-3'-phosphate
  modified_base 9: mod_base = OTHER; note = guanosine-3'-phosphate
  modified_base 10: mod_base = OTHER; note = uridine-3'-phosphate
  modified_base 11: mod_base = OTHER; note = guanosine-3'-phosphate
  modified_base 12: mod_base = OTHER; note = cytidine-3'-phosphate
  modified_base 13: mod_base = OTHER; note = adenosine-3'-phosphate
  modified_base 14: mod_base = OTHER; note = guanosine-3'-phosphate
  modified_base 15: mod_base = OTHER; note = uridine-3'-phosphate
  modified_base 16: mod_base = OTHER; note = uridine-3'-phosphate
  modified_base 17: mod_base = OTHER; note = guanosine-3'-phosphate
  modified_base 18: mod_base = OTHER; note = adenosine-3'-phosphate
  modified_base 19: mod_base = OTHER; note = uridine-3'-phosphate
  misc_feature 1..19: note = RNA
  misc_feature 20..21: note = DNA
aagtggatgtgcagttgattt

SEQ ID NO: 965 - DNA, 21 bp, synthetic construct
  source 1..21: mol_type = other DNA
  modified_base 1: mod_base = OTHER; note = guanosine-3'-phosphate
  modified_base 2: mod_base = OTHER; note = cytidine-3'-phosphate
  modified_base 3: mod_base = OTHER; note = adenosine-3'-phosphate
  modified_base 4: mod_base = OTHER; note = guanosine-3'-phosphate
  modified_base 5: mod_base = OTHER; note = uridine-3'-phosphate
  modified_base 6: mod_base = OTHER; note = uridine-3'-phosphate
  modified_base 7: mod_base = OTHER; note = guanosine-3'-phosphate
  modified_base 8: mod_base = OTHER; note = adenosine-3'-phosphate
  modified_base 9: mod_base = OTHER; note = uridine-3'-phosphate
  modified_base 10: mod_base = OTHER; note = cytidine-3'-phosphate
  modified_base 11: mod_base = OTHER; note = cytidine-3'-phosphate
  modified_base 12: mod_base = OTHER; note = cytidine-3'-phosphate
  modified_base 13: mod_base = OTHER; note = adenosine-3'-phosphate
  modified_base 14: mod_base = OTHER; note = cytidine-3'-phosphate
  modified_base 15: mod_base = OTHER; note = adenosine-3'-phosphate
  modified_base 16: mod_base = OTHER; note = guanosine-3'-phosphate
  modified_base 17: mod_base = OTHER; note = guanosine-3'-phosphate
  modified_base 18: mod_base = OTHER; note = adenosine-3'-phosphate
  modified_base 19: mod_base = OTHER; note = cytidine-3'-phosphate
  misc_feature 1..19: note = RNA
  misc_feature 20..21: note = DNA
gcagttgatcccacaggactt

SEQ ID NO: 966 - DNA, 21 bp, synthetic construct
  source 1..21: mol_type = other DNA
  modified_base 1: mod_base = OTHER; note = cytidine-3'-phosphate
  modified_base 2: mod_base = OTHER; note = adenosine-3'-phosphate
  modified_base 3: mod_base = OTHER; note = cytidine-3'-phosphate
  modified_base 4: mod_base = OTHER; note = adenosine-3'-phosphate
  modified_base 5: mod_base = OTHER; note = guanosine-3'-phosphate
  modified_base 6: mod_base = OTHER; note = guanosine-3'-phosphate
  modified_base 7: mod_base = OTHER; note = adenosine-3'-phosphate
  modified_base 8: mod_base = OTHER; note = cytidine-3'-phosphate
  modified_base 9: mod_base = OTHER; note = cytidine-3'-phosphate
  modified_base 10: mod_base = OTHER; note = uridine-3'-phosphate
  modified_base 11: mod_base = OTHER; note = guanosine-3'-phosphate
  modified_base 12: mod_base = OTHER; note = uridine-3'-phosphate
  modified_base 13: mod_base = OTHER; note = guanosine-3'-phosphate
  modified_base 14: mod_base = OTHER; note = cytidine-3'-phosphate
  modified_base 15: mod_base = OTHER; note = adenosine-3'-phosphate
  modified_base 16: mod_base = OTHER; note = guanosine-3'-phosphate
  modified_base 17: mod_base = OTHER; note = cytidine-3'-phosphate
  modified_base 18: mod_base = OTHER; note = guanosine-3'-phosphate
  modified_base 19: mod_base = OTHER; note = adenosine-3'-phosphate
  misc_feature 1..19: note = RNA
  misc_feature 20..21: note = DNA
cacaggacctgtgcagcgatt

SEQ ID NO: 967 - DNA, 21 bp, synthetic construct
  source 1..21: mol_type = other DNA
  modified_base 1: mod_base = OTHER; note = guanosine-3'-phosphate
  modified_base 2: mod_base = OTHER; note = cytidine-3'-phosphate
  modified_base 3: mod_base = OTHER; note = adenosine-3'-phosphate
  modified_base 4: mod_base = OTHER; note = guanosine-3'-phosphate
  modified_base 5: mod_base = OTHER; note = cytidine-3'-phosphate
  modified_base 6: mod_base = OTHER; note = guanosine-3'-phosphate
  modified_base 7: mod_base = OTHER; note = adenosine-3'-phosphate
  modified_base 8: mod_base = OTHER; note = guanosine-3'-phosphate
  modified_base 9: mod_base = OTHER; note = guanosine-3'-phosphate
  modified_base 10: mod_base = OTHER; note = uridine-3'-phosphate
  modified_base 11: mod_base = OTHER; note = cytidine-3'-phosphate
  modified_base 12: mod_base = OTHER; note = uridine-3'-phosphate
  modified_base 13: mod_base = OTHER; note = adenosine-3'-phosphate
  modified_base 14: mod_base = OTHER; note = uridine-3'-phosphate
  modified_base 15: mod_base = OTHER; note = cytidine-3'-phosphate
  modified_base 16: mod_base = OTHER; note = guanosine-3'-phosphate
  modified_base 17: mod_base = OTHER; note = cytidine-3'-phosphate
  modified_base 18: mod_base = OTHER; note = uridine-3'-phosphate
  modified_base 19: mod_base = OTHER; note = adenosine-3'-phosphate
  misc_feature 1..19: note = RNA
  misc_feature 20..21: note = DNA
gcagcgaggtctatcgctatt

SEQ ID NO: 968 - DNA, 21 bp, synthetic construct
  source 1..21: mol_type = other DNA
  modified_base 1: mod_base = OTHER; note = guanosine-3'-phosphate
  modified_base 2: mod_base = OTHER; note = uridine-3'-phosphate
  modified_base 3: mod_base = OTHER; note = cytidine-3'-phosphate
  modified_base 4: mod_base = OTHER; note = uridine-3'-phosphate
  modified_base 5: mod_base = OTHER; note = adenosine-3'-phosphate
  modified_base 6: mod_base = OTHER; note = uridine-3'-phosphate
  modified_base 7: mod_base = OTHER; note = cytidine-3'-phosphate
  modified_base 8: mod_base = OTHER; note = guanosine-3'-phosphate
  modified_base 9: mod_base = OTHER; note = cytidine-3'-phosphate
  modified_base 10: mod_base = OTHER; note = uridine-3'-phosphate
  modified_base 11: mod_base = OTHER; note = adenosine-3'-phosphate
  modified_base 12: mod_base = OTHER; note = cytidine-3'-phosphate
  modified_base 13: mod_base = OTHER; note = cytidine-3'-phosphate
  modified_base 14: mod_base = OTHER; note = adenosine-3'-phosphate
  modified_base 15: mod_base = OTHER; note = guanosine-3'-phosphate
  modified_base 16: mod_base = OTHER; note = guanosine-3'-phosphate
  modified_base 17: mod_base = OTHER; note = uridine-3'-phosphate
  modified_base 18: mod_base = OTHER; note = guanosine-3'-phosphate
  modified_base 19: mod_base = OTHER; note = adenosine-3'-phosphate
  misc_feature 1..19: note = RNA
  misc_feature 20..21: note = DNA
gtctatcgctaccaggtgatt

SEQ ID NO: 969 - DNA, 21 bp, synthetic construct
  source 1..21: mol_type = other DNA
  modified_base 1: mod_base = OTHER; note = cytidine-3'-phosphate
  modified_base 2: mod_base = OTHER; note = cytidine-3'-phosphate
  modified_base 3: mod_base = OTHER; note = adenosine-3'-phosphate
  modified_base 4: mod_base = OTHER; note = guanosine-3'-phosphate
  modified_base 5: mod_base = OTHER; note = guanosine-3'-phosphate
  modified_base 6: mod_base = OTHER; note = uridine-3'-phosphate
  modified_base 7: mod_base = OTHER; note = guanosine-3'-phosphate
  modified_base 8: mod_base = OTHER; note = adenosine-3'-phosphate
  modified_base 9: mod_base = OTHER; note = cytidine-3'-phosphate
  modified_base 10: mod_base = OTHER; note = guanosine-3'-phosphate
  modified_base 11: mod_base = OTHER; note = cytidine-3'-phosphate
  modified_base 12: mod_base = OTHER; note = cytidine-3'-phosphate
  modified_base 13: mod_base = OTHER; note = adenosine-3'-phosphate
  modified_base 14: mod_base = OTHER; note = cytidine-3'-phosphate
  modified_base 15: mod_base = OTHER; note = guanosine-3'-phosphate
  modified_base 16: mod_base = OTHER; note = cytidine-3'-phosphate
  modified_base 17: mod_base = OTHER; note = adenosine-3'-phosphate
  modified_base 18: mod_base = OTHER; note = uridine-3'-phosphate
  modified_base 19: mod_base = OTHER; note = guanosine-3'-phosphate
  misc_feature 1..19: note = RNA
  misc_feature 20..21: note = DNA
ccaggtgacgccacgcatgtt

SEQ ID NO: 970 - DNA, 21 bp, synthetic construct
  source 1..21: mol_type = other DNA
  modified_base 1: mod_base = OTHER; note = cytidine-3'-phosphate
  modified_base 2: mod_base = OTHER; note = cytidine-3'-phosphate
  modified_base 3: mod_base = OTHER; note = adenosine-3'-phosphate
  modified_base 4: mod_base = OTHER; note = cytidine-3'-phosphate
  modified_base 5: mod_base = OTHER; note = guanosine-3'-phosphate
  modified_base 6: mod_base = OTHER; note = cytidine-3'-phosphate
  modified_base 7: mod_base = OTHER; note = adenosine-3'-phosphate
  modified_base 8: mod_base = OTHER; note = uridine-3'-phosphate
  modified_base 9: mod_base = OTHER; note = guanosine-3'-phosphate
  modified_base 10: mod_base = OTHER; note = cytidine-3'-phosphate
  modified_base 11: mod_base = OTHER; note = uridine-3'-phosphate
  modified_base 12: mod_base = OTHER; note = guanosine-3'-phosphate
  modified_base 13: mod_base = OTHER; note = uridine-3'-phosphate
  modified_base 14: mod_base = OTHER; note = guanosine-3'-phosphate
  modified_base 15: mod_base = OTHER; note = uridine-3'-phosphate
  modified_base 16: mod_base = OTHER; note = guanosine-3'-phosphate
  modified_base 17: mod_base = OTHER; note = cytidine-3'-phosphate
  modified_base 18: mod_base = OTHER; note = cytidine-3'-phosphate
  modified_base 19: mod_base = OTHER; note = guanosine-3'-phosphate
  misc_feature 1..19: note = RNA
  misc_feature 20..21: note = DNA
ccacgcatgctgtgtgccgtt

SEQ ID NO: 971 - DNA, 21 bp, synthetic construct
  source 1..21: mol_type = other DNA
  modified_base 1: mod_base = OTHER; note = cytidine-3'-phosphate
  modified_base 2: mod_base = OTHER; note = uridine-3'-phosphate
  modified_base 3: mod_base = OTHER; note = guanosine-3'-phosphate
  modified_base 4: mod_base = OTHER; note = uridine-3'-phosphate
  modified_base 5: mod_base = OTHER; note = guanosine-3'-phosphate
  modified_base 6: mod_base = OTHER; note = uridine-3'-phosphate
  modified_base 7: mod_base = OTHER; note = guanosine-3'-phosphate
  modified_base 8: mod_base = OTHER; note = cytidine-3'-phosphate
  modified_base 9: mod_base = OTHER; note = cytidine-3'-phosphate
  modified_base 10: mod_base = OTHER; note = guanosine-3'-phosphate
  modified_base 11: mod_base = OTHER; note = guanosine-3'-phosphate
  modified_base 12: mod_base = OTHER; note = cytidine-3'-phosphate
  modified_base 13: mod_base = OTHER; note = uridine-3'-phosphate
  modified_base 14: mod_base = OTHER; note = adenosine-3'-phosphate
  modified_base 15: mod_base = OTHER; note = cytidine-3'-phosphate
  modified_base 16: mod_base = OTHER; note = cytidine-3'-phosphate
  modified_base 17: mod_base = OTHER; note = guanosine-3'-phosphate
  modified_base 18: mod_base = OTHER; note = cytidine-3'-phosphate
  modified_base 19: mod_base = OTHER; note = adenosine-3'-phosphate
  misc_feature 1..19: note = RNA
  misc_feature 20..21: note = DNA
ctgtgtgccggctaccgcatt

SEQ ID NO: 972 - DNA, 21 bp, synthetic construct
  source 1..21: mol_type = other DNA
  modified_base 1: mod_base = OTHER; note = adenosine-3'-phosphate
  modified_base 2: mod_base = OTHER; note = cytidine-3'-phosphate
  modified_base 3: mod_base = OTHER; note = cytidine-3'-phosphate
  modified_base 4: mod_base = OTHER; note = guanosine-3'-phosphate
  modified_base 5: mod_base = OTHER; note = cytidine-3'-phosphate
  modified_base 6: mod_base = OTHER; note = adenosine-3'-phosphate
  modified_base 7: mod_base = OTHER; note = adenosine-3'-phosphate
  modified_base 8: mod_base = OTHER; note = guanosine-3'-phosphate
  modified_base 9: mod_base = OTHER; note = guanosine-3'-phosphate
  modified_base 10: mod_base = OTHER; note = guanosine-3'-phosphate
  modified_base 11: mod_base = OTHER; note = cytidine-3'-phosphate
  modified_base 12: mod_base = OTHER; note = adenosine-3'-phosphate
  modified_base 13: mod_base = OTHER; note = adenosine-3'-phosphate
  modified_base 14: mod_base = OTHER; note = guanosine-3'-phosphate
  modified_base 15: mod_base = OTHER; note = adenosine-3'-phosphate
  modified_base 16: mod_base = OTHER; note = adenosine-3'-phosphate
  modified_base 17: mod_base = OTHER; note = guanosine-3'-phosphate
  modified_base 18: mod_base = OTHER; note = guanosine-3'-phosphate
  modified_base 19: mod_base = OTHER; note = adenosine-3'-phosphate
  misc_feature 1..19: note = RNA
  misc_feature 20..21: note = DNA
accgcaagggcaagaaggatt

SEQ ID NO: 973 - DNA, 21 bp, synthetic construct
  source 1..21: mol_type = other DNA
  modified_base 1: mod_base = OTHER; note = guanosine-3'-phosphate
  modified_base 2: mod_base = OTHER; note = cytidine-3'-phosphate
  modified_base 3: mod_base = OTHER; note = adenosine-3'-phosphate
  modified_base 4: mod_base = OTHER; note = adenosine-3'-phosphate
  modified_base 5: mod_base = OTHER; note = guanosine-3'-phosphate
  modified_base 6: mod_base = OTHER; note = adenosine-3'-phosphate
  modified_base 7: mod_base = OTHER; note = adenosine-3'-phosphate
  modified_base 8: mod_base = OTHER; note = guanosine-3'-phosphate
  modified_base 9: mod_base = OTHER; note = guanosine-3'-phosphate
  modified_base 10: mod_base = OTHER; note = adenosine-3'-phosphate
  modified_base 11: mod_base = OTHER; note = uridine-3'-phosphate
  modified_base 12: mod_base = OTHER; note = guanosine-3'-phosphate
  modified_base 13: mod_base = OTHER; note = cytidine-3'-phosphate
  modified_base 14: mod_base = OTHER; note = cytidine-3'-phosphate
  modified_base 15: mod_base = OTHER; note = uridine-3'-phosphate
  modified_base 16: mod_base = OTHER; note = guanosine-3'-phosphate
  modified_base 17: mod_base = OTHER; note = uridine-3'-phosphate
  modified_base 18: mod_base = OTHER; note = cytidine-3'-phosphate
  modified_base 19: mod_base = OTHER; note = adenosine-3'-phosphate
  misc_feature 1..19: note = RNA
  misc_feature 20..21: note = DNA
gcaagaaggatgcctgtcatt

SEQ ID NO: 974 - DNA, 21 bp, synthetic construct
  source 1..21: mol_type = other DNA
  modified_base 1: mod_base = OTHER; note = guanosine-3'-phosphate
  modified_base 2: mod_base = OTHER; note = cytidine-3'-phosphate
  modified_base 3: mod_base = OTHER; note = cytidine-3'-phosphate
  modified_base 4: mod_base = OTHER; note = uridine-3'-phosphate
  modified_base 5: mod_base = OTHER; note = guanosine-3'-phosphate
  modified_base 6: mod_base = OTHER; note = uridine-3'-phosphate
  modified_base 7: mod_base = OTHER; note = cytidine-3'-phosphate
  modified_base 8: mod_base = OTHER; note = adenosine-3'-phosphate
  modified_base 9: mod_base = OTHER; note = guanosine-3'-phosphate
  modified_base 10: mod_base = OTHER; note = guanosine-3'-phosphate
  modified_base 11: mod_base = OTHER; note = guanosine-3'-phosphate
  modified_base 12: mod_base = OTHER; note = uridine-3'-phosphate
  modified_base 13: mod_base = OTHER; note = guanosine-3'-phosphate
  modified_base 14: mod_base = OTHER; note = adenosine-3'-phosphate
  modified_base 15: mod_base = OTHER; note = cytidine-3'-phosphate
  modified_base 16: mod_base = OTHER; note = uridine-3'-phosphate
  modified_base 17: mod_base = OTHER; note = cytidine-3'-phosphate
  modified_base 18: mod_base = OTHER; note = adenosine-3'-phosphate
  modified_base 19: mod_base = OTHER; note = guanosine-3'-phosphate
  misc_feature 1..19: note = RNA
  misc_feature 20..21: note = DNA
gcctgtcagggtgactcagtt

SEQ ID NO: 975 - DNA, 21 bp, synthetic construct
  source 1..21: mol_type = other DNA
  modified_base 1: mod_base = OTHER; note = guanosine-3'-phosphate
  modified_base 2: mod_base = OTHER; note = uridine-3'-phosphate
  modified_base 3: mod_base = OTHER; note = guanosine-3'-phosphate
  modified_base 4: mod_base = OTHER; note = adenosine-3'-phosphate
  modified_base 5: mod_base = OTHER; note = cytidine-3'-phosphate
  modified_base 6: mod_base = OTHER; note = uridine-3'-phosphate
  modified_base 7: mod_base = OTHER; note = cytidine-3'-phosphate
  modified_base 8: mod_base = OTHER; note = adenosine-3'-phosphate
  modified_base 9: mod_base = OTHER; note = guanosine-3'-phosphate
  modified_base 10: mod_base = OTHER; note = guanosine-3'-phosphate
  modified_base 11: mod_base = OTHER; note = uridine-3'-phosphate
  modified_base 12: mod_base = OTHER; note = guanosine-3'-phosphate
  modified_base 13: mod_base = OTHER; note = guanosine-3'-phosphate
  modified_base 14: mod_base = OTHER; note = uridine-3'-phosphate
  modified_base 15: mod_base = OTHER; note = cytidine-3'-phosphate
  modified_base 16: mod_base = OTHER; note = cytidine-3'-phosphate
  modified_base 17: mod_base = OTHER; note = guanosine-3'-phosphate
  modified_base 18: mod_base = OTHER; note = cytidine-3'-phosphate
  modified_base 19: mod_base = OTHER; note = uridine-3'-phosphate
  misc_feature 1..19: note = RNA
  misc_feature 20..21: note = DNA
gtgactcaggtggtccgcttt

SEQ ID NO: 976 - DNA, 21 bp, synthetic construct
  source 1..21: mol_type = other DNA
  modified_base 1: mod_base = OTHER; note = guanosine-3'-phosphate
  modified_base 2: mod_base = OTHER; note = uridine-3'-phosphate
  modified_base 3: mod_base = OTHER; note = guanosine-3'-phosphate
  modified_base 4: mod_base = OTHER; note = guanosine-3'-phosphate
  modified_base 5: mod_base = OTHER; note = uridine-3'-phosphate
  modified_base 6: mod_base = OTHER; note = cytidine-3'-phosphate
  modified_base 7: mod_base = OTHER; note = cytidine-3'-phosphate
  modified_base 8: mod_base = OTHER; note = guanosine-3'-phosphate
  modified_base 9: mod_base = OTHER; note = cytidine-3'-phosphate
  modified_base 10: mod_base = OTHER; note = uridine-3'-phosphate
  modified_base 11: mod_base = OTHER; note = guanosine-3'-phosphate
  modified_base 12: mod_base = OTHER; note = guanosine-3'-phosphate
  modified_base 13: mod_base = OTHER; note = uridine-3'-phosphate
  modified_base 14: mod_base = OTHER; note = guanosine-3'-phosphate
  modified_base 15: mod_base = OTHER; note = uridine-3'-phosphate
  modified_base 16: mod_base = OTHER; note = guanosine-3'-phosphate
  modified_base 17: mod_base = OTHER; note = cytidine-3'-phosphate
  modified_base 18: mod_base = OTHER; note = adenosine-3'-phosphate
  modified_base 19: mod_base = OTHER; note = adenosine-3'-phosphate
  misc_feature 1..19: note = RNA
  misc_feature 20..21: note = DNA
gtggtccgctggtgtgcaatt

SEQ ID NO: 977 - DNA, 21 bp, synthetic construct
  source 1..21: mol_type = other DNA
  modified_base 1: mod_base = OTHER; note = uridine-3'-phosphate
  modified_base 2: mod_base = OTHER; note = guanosine-3'-phosphate
  modified_base 3: mod_base = OTHER; note = guanosine-3'-phosphate
  modified_base 4: mod_base = OTHER; note = uridine-3'-phosphate
  modified_base 5: mod_base = OTHER; note = guanosine-3'-phosphate
  modified_base 6: mod_base = OTHER; note = uridine-3'-phosphate
  modified_base 7: mod_base = OTHER; note = guanosine-3'-phosphate
  modified_base 8: mod_base = OTHER; note = cytidine-3'-phosphate
  modified_base 9: mod_base = OTHER; note = adenosine-3'-phosphate
  modified_base 10: mod_base = OTHER; note = adenosine-3'-phosphate
  modified_base 11: mod_base = OTHER; note = guanosine-3'-phosphate
  modified_base 12: mod_base = OTHER; note = guanosine-3'-phosphate
  modified_base 13: mod_base = OTHER; note = cytidine-3'-phosphate
  modified_base 14: mod_base = OTHER; note = adenosine-3'-phosphate
  modified_base 15: mod_base = OTHER; note = cytidine-3'-phosphate
  modified_base 16: mod_base = OTHER; note = uridine-3'-phosphate
  modified_base 17: mod_base = OTHER; note = cytidine-3'-phosphate
  modified_base 18: mod_base = OTHER; note = adenosine-3'-phosphate
  modified_base 19: mod_base = OTHER; note = guanosine-3'-phosphate
  misc_feature 1..19: note = RNA
  misc_feature 20..21: note = DNA
tggtgtgcaaggcactcagtt

SEQ ID NO: 978 - DNA, 21 bp, synthetic construct
  source 1..21: mol_type = other DNA
  modified_base 1: mod_base = OTHER; note = guanosine-3'-phosphate
  modified_base 2: mod_base = OTHER; note = cytidine-3'-phosphate
  modified_base 3: mod_base = OTHER; note = adenosine-3'-phosphate
  modified_base 4: mod_base = OTHER; note = cytidine-3'-phosphate
  modified_base 5: mod_base = OTHER; note = uridine-3'-phosphate
  modified_base 6: mod_base = OTHER; note = cytidine-3'-phosphate
  modified_base 7: mod_base = OTHER; note = adenosine-3'-phosphate
  modified_base 8: mod_base = OTHER; note = guanosine-3'-phosphate
  modified_base 9: mod_base = OTHER; note = uridine-3'-phosphate
  modified_base 10: mod_base = OTHER; note = guanosine-3'-phosphate
  modified_base 11: mod_base = OTHER; note = guanosine-3'-phosphate
  modified_base 12: mod_base = OTHER; note = cytidine-3'-phosphate
  modified_base 13: mod_base = OTHER; note = cytidine-3'-phosphate
  modified_base 14: mod_base = OTHER; note = guanosine-3'-phosphate
  modified_base 15: mod_base = OTHER; note = cytidine-3'-phosphate
  modified_base 16: mod_base = OTHER; note = uridine-3'-phosphate
  modified_base 17: mod_base = OTHER; note = guanosine-3'-phosphate
  modified_base 18: mod_base = OTHER; note = guanosine-3'-phosphate
  modified_base 19: mod_base = OTHER; note = uridine-3'-phosphate
  misc_feature 1..19: note = RNA
  misc_feature 20..21: note = DNA
gcactcagtggccgctggttt

SEQ ID NO: 979 - DNA, 21 bp, synthetic construct
  source 1..21: mol_type = other DNA
  modified_base 1: mod_base = OTHER; note = guanosine-3'-phosphate
  modified_base 2: mod_base = OTHER; note = cytidine-3'-phosphate
  modified_base 3: mod_base = OTHER; note = cytidine-3'-phosphate
  modified_base 4: mod_base = OTHER; note = guanosine-3'-phosphate
  modified_base 5: mod_base = OTHER; note = cytidine-3'-phosphate
  modified_base 6: mod_base = OTHER; note = uridine-3'-phosphate
  modified_base 7: mod_base = OTHER; note = guanosine-3'-phosphate
  modified_base 8: mod_base = OTHER; note = guanosine-3'-phosphate
  modified_base 9: mod_base = OTHER; note = uridine-3'-phosphate
  modified_base 10: mod_base = OTHER; note = uridine-3'-phosphate
  modified_base 11: mod_base = OTHER; note = cytidine-3'-phosphate
  modified_base 12: mod_base = OTHER; note = cytidine-3'-phosphate
  modified_base 13: mod_base = OTHER; note = uridine-3'-phosphate
  modified_base 14: mod_base = OTHER; note = guanosine-3'-phosphate
  modified_base 15: mod_base = OTHER; note = guanosine-3'-phosphate
  modified_base 16: mod_base = OTHER; note = cytidine-3'-phosphate
  modified_base 17: mod_base = OTHER; note = guanosine-3'-phosphate
  modified_base 18: mod_base = OTHER; note = guanosine-3'-phosphate
  modified_base 19: mod_base = OTHER; note = guanosine-3'-phosphate
  misc_feature 1..19: note = RNA
  misc_feature 20..21: note = DNA
gccgctggttcctggcgggtt

SEQ ID NO: 980 - DNA, 21 bp, synthetic construct
  source 1..21: mol_type = other DNA
  modified_base 1: mod_base = OTHER; note = uridine-3'-phosphate
  modified_base 2: mod_base = OTHER; note = cytidine-3'-phosphate
  modified_base 3: mod_base = OTHER; note = cytidine-3'-phosphate
  modified_base 4: mod_base = OTHER; note = uridine-3'-phosphate
  modified_base 5: mod_base = OTHER; note = guanosine-3'-phosphate
  modified_base 6: mod_base = OTHER; note = guanosine-3'-phosphate
  modified_base 7: mod_base = OTHER; note = cytidine-3'-phosphate
  modified_base 8: mod_base = OTHER; note = guanosine-3'-phosphate
  modified_base 9: mod_base = OTHER; note = guanosine-3'-phosphate
  modified_base 10: mod_base = OTHER; note = guanosine-3'-phosphate
  modified_base 11: mod_base = OTHER; note = guanosine-3'-phosphate
  modified_base 12: mod_base = OTHER; note = cytidine-3'-phosphate
  modified_base 13: mod_base = OTHER; note = uridine-3'-phosphate
  modified_base 14: mod_base = OTHER; note = guanosine-3'-phosphate
  modified_base 15: mod_base = OTHER; note = guanosine-3'-phosphate
  modified_base 16: mod_base = OTHER; note = uridine-3'-phosphate
  modified_base 17: mod_base = OTHER; note = cytidine-3'-phosphate
  modified_base 18: mod_base = OTHER; note = adenosine-3'-phosphate
  modified_base 19: mod_base = OTHER; note = guanosine-3'-phosphate
  misc_feature 1..19: note = RNA
  misc_feature 20..21: note = DNA
tcctggcggggctggtcagtt

SEQ ID NO: 981 - DNA, 21 bp, synthetic construct
  source 1..21: mol_type = other DNA
  modified_base 1: mod_base = OTHER; note = guanosine-3'-phosphate
  modified_base 2: mod_base = OTHER; note = cytidine-3'-phosphate
  modified_base 3: mod_base = OTHER; note = uridine-3'-phosphate
  modified_base 4: mod_base = OTHER; note = guanosine-3'-phosphate
  modified_base 5: mod_base = OTHER; note = guanosine-3'-phosphate
  modified_base 6: mod_base = OTHER; note = uridine-3'-phosphate
  modified_base 7: mod_base = OTHER; note = cytidine-3'-phosphate
  modified_base 8: mod_base = OTHER; note = adenosine-3'-phosphate
  modified_base 9: mod_base = OTHER; note = guanosine-3'-phosphate
  modified_base 10: mod_base = OTHER; note = cytidine-3'-phosphate
  modified_base 11: mod_base = OTHER; note = uridine-3'-phosphate
  modified_base 12: mod_base = OTHER; note = guanosine-3'-phosphate
  modified_base 13: mod_base = OTHER; note = guanosine-3'-phosphate
  modified_base 14: mod_base = OTHER; note = guanosine-3'-phosphate
  modified_base 15: mod_base = OTHER; note = guanosine-3'-phosphate
  modified_base 16: mod_base = OTHER; note = cytidine-3'-phosphate
  modified_base 17: mod_base = OTHER; note = cytidine-3'-phosphate
  modified_base 18: mod_base = OTHER; note = uridine-3'-phosphate
  modified_base 19: mod_base = OTHER; note = guanosine-3'-phosphate
  misc_feature 1..19: note = RNA
  misc_feature 20..21: note = DNA
gctggtcagctggggcctgtt

SEQ ID NO: 982 - DNA, 21 bp, synthetic construct
  source 1..21: mol_type = other DNA
  modified_base 1: mod_base = OTHER; note = guanosine-3'-phosphate
  modified_base 2: mod_base = OTHER; note = guanosine-3'-phosphate
  modified_base 3: mod_base = OTHER; note = guanosine-3'-phosphate
  modified_base 4: mod_base = OTHER; note = cytidine-3'-phosphate
  modified_base 5: mod_base = OTHER; note = cytidine-3'-phosphate
  modified_base 6: mod_base = OTHER; note = uridine-3'-phosphate
  modified_base 7: mod_base = OTHER; note = guanosine-3'-phosphate
  modified_base 8: mod_base = OTHER; note = guanosine-3'-phosphate
  modified_base 9: mod_base = OTHER; note = guanosine-3'-phosphate
  modified_base 10: mod_base = OTHER; note = cytidine-3'-phosphate
  modified_base 11: mod_base = OTHER; note = uridine-3'-phosphate
  modified_base 12: mod_base = OTHER; note = guanosine-3'-phosphate
  modified_base 13: mod_base = OTHER; note = uridine-3'-phosphate
  modified_base 14: mod_base = OTHER; note = guanosine-3'-phosphate
  modified_base 15: mod_base = OTHER; note = guanosine-3'-phosphate
  modified_base 16: mod_base = OTHER; note = cytidine-3'-phosphate
  modified_base 17: mod_base = OTHER; note = cytidine-3'-phosphate
  modified_base 18: mod_base = OTHER; note = guanosine-3'-phosphate
  modified_base 19: mod_base = OTHER; note = guanosine-3'-phosphate
  misc_feature 1..19: note = RNA
  misc_feature 20..21: note = DNA
gggcctgggctgtggccggtt

SEQ ID NO: 983 - DNA, 21 bp, synthetic construct
  source 1..21: mol_type = other DNA
  modified_base 1: mod_base = OTHER; note = guanosine-3'-phosphate
  modified_base 2: mod_base = OTHER; note = guanosine-3'-phosphate
  modified_base 3: mod_base = OTHER; note = cytidine-3'-phosphate
  modified_base 4: mod_base = OTHER; note = uridine-3'-phosphate
  modified_base 5: mod_base = OTHER; note = guanosine-3'-phosphate
  modified_base 6: mod_base = OTHER; note = uridine-3'-phosphate
  modified_base 7: mod_base = OTHER; note = guanosine-3'-phosphate
  modified_base 8: mod_base = OTHER; note = guanosine-3'-phosphate
  modified_base 9: mod_base = OTHER; note = cytidine-3'-phosphate
  modified_base 10: mod_base = OTHER; note = cytidine-3'-phosphate
  modified_base 11: mod_base = OTHER; note = guanosine-3'-phosphate
  modified_base 12: mod_base = OTHER; note = guanosine-3'-phosphate
  modified_base 13: mod_base = OTHER; note = cytidine-3'-phosphate
  modified_base 14: mod_base = OTHER; note = cytidine-3'-phosphate
  modified_base 15: mod_base = OTHER; note = uridine-3'-phosphate
  modified_base 16: mod_base = OTHER; note = adenosine-3'-phosphate
  modified_base 17: mod_base = OTHER; note = adenosine-3'-phosphate
  modified_base 18: mod_base = OTHER; note = cytidine-3'-phosphate
  modified_base 19: mod_base = OTHER; note = uridine-3'-phosphate
  misc_feature 1..19: note = RNA
  misc_feature 20..21: note = DNA
ggctgtggccggcctaacttt

SEQ ID NO: 984 - DNA, 21 bp, synthetic construct
  source 1..21: mol_type = other DNA
  modified_base 1: mod_base = OTHER; note = cytidine-3'-phosphate
  modified_base 2: mod_base = OTHER; note = uridine-3'-phosphate
  modified_base 3: mod_base = OTHER; note = adenosine-3'-phosphate
  modified_base 4: mod_base = OTHER; note = adenosine-3'-phosphate
  modified_base 5: mod_base = OTHER; note = cytidine-3'-phosphate
  modified_base 6: mod_base = OTHER; note = uridine-3'-phosphate
  modified_base 7: mod_base = OTHER; note = adenosine-3'-phosphate
  modified_base 8: mod_base = OTHER; note = cytidine-3'-phosphate
  modified_base 9: mod_base = OTHER; note = uridine-3'-phosphate
  modified_base 10: mod_base = OTHER; note = uridine-3'-phosphate
  modified_base 11: mod_base = OTHER; note = cytidine-3'-phosphate
  modified_base 12: mod_base = OTHER; note = guanosine-3'-phosphate
  modified_base 13: mod_base = OTHER; note = guanosine-3'-phosphate
  modified_base 14: mod_base = OTHER; note = cytidine-3'-phosphate
  modified_base 15: mod_base = OTHER; note = guanosine-3'-phosphate
  modified_base 16: mod_base = OTHER; note = uridine-3'-phosphate
  modified_base 17: mod_base = OTHER; note = cytidine-3'-phosphate
  modified_base 18: mod_base = OTHER; note = uridine-3'-phosphate
  modified_base 19: mod_base = OTHER; note = adenosine-3'-phosphate
  misc_feature 1..19: note = RNA
  misc_feature 20..21: note = DNA
ctaactacttcggcgtctatt

SEQ ID NO: 985 - DNA, 21 bp, synthetic construct
  source 1..21: mol_type = other DNA
  modified_base 1: mod_base = OTHER; note = cytidine-3'-phosphate
  modified_base 2: mod_base = OTHER; note = guanosine-3'-phosphate
  modified_base 3: mod_base = OTHER; note = guanosine-3'-phosphate
  modified_base 4: mod_base = OTHER; note = cytidine-3'-phosphate
  modified_base 5: mod_base = OTHER; note = guanosine-3'-phosphate
  modified_base 6: mod_base = OTHER; note = uridine-3'-phosphate
  modified_base 7: mod_base = OTHER; note = cytidine-3'-phosphate
  modified_base 8: mod_base = OTHER; note = uridine-3'-phosphate
  modified_base 9: mod_base = OTHER; note = adenosine-3'-phosphate
  modified_base 10: mod_base = OTHER; note = cytidine-3'-phosphate
  modified_base 11: mod_base = OTHER; note = adenosine-3'-phosphate
  modified_base 12: mod_base = OTHER; note = cytidine-3'-phosphate
  modified_base 13: mod_base = OTHER; note = cytidine-3'-phosphate
  modified_base 14: mod_base = OTHER; note = cytidine-3'-phosphate
  modified_base 15: mod_base = OTHER; note = guanosine-3'-phosphate
  modified_base 16: mod_base = OTHER; note = cytidine-3'-phosphate
  modified_base 17: mod_base = OTHER; note = adenosine-3'-phosphate
  modified_base 18: mod_base = OTHER; note = uridine-3'-phosphate
  modified_base 19: mod_base = OTHER; note = cytidine-3'-phosphate
  misc_feature 1..19: note = RNA
  misc_feature 20..21: note = DNA
cggcgtctacacccgcatctt

SEQ ID NO: 986 - DNA, 21 bp, synthetic construct
  source 1..21: mol_type = other DNA
  modified_base 1: mod_base = OTHER; note = adenosine-3'-phosphate
  modified_base 2: mod_base = OTHER; note = cytidine-3'-phosphate
  modified_base 3: mod_base = OTHER; note = adenosine-3'-phosphate
  modified_base 4: mod_base = OTHER; note = cytidine-3'-phosphate
  modified_base 5: mod_base = OTHER; note = cytidine-3'-phosphate
  modified_base 6: mod_base = OTHER; note = cytidine-3'-phosphate
  modified_base 7: mod_base = OTHER; note = guanosine-3'-phosphate
  modified_base 8: mod_base = OTHER; note = cytidine-3'-phosphate
  modified_base 9: mod_base = OTHER; note = adenosine-3'-phosphate
  modified_base 10: mod_base = OTHER; note = uridine-3'-phosphate
  modified_base 11: mod_base = OTHER; note = cytidine-3'-phosphate
  modified_base 12: mod_base = OTHER; note = adenosine-3'-phosphate
  modified_base 13: mod_base = OTHER; note = cytidine-3'-phosphate
  modified_base 14: mod_base = OTHER; note = adenosine-3'-phosphate
  modified_base 15: mod_base = OTHER; note = guanosine-3'-phosphate
  modified_base 16: mod_base = OTHER; note = guanosine-3'-phosphate
  modified_base 17: mod_base = OTHER; note = uridine-3'-phosphate
  modified_base 18: mod_base = OTHER; note = guanosine-3'-phosphate
  modified_base 19: mod_base = OTHER; note = uridine-3'-phosphate
  misc_feature 1..19: note = RNA
  misc_feature 20..21: note = DNA
acacccgcatcacaggtgttt

SEQ ID NO: 987 - DNA, 21 bp, synthetic construct
  source 1..21: mol_type = other DNA
  modified_base 1: mod_base = OTHER; note = adenosine-3'-phosphate
  modified_base 2: mod_base = OTHER; note = cytidine-3'-phosphate
  modified_base 3: mod_base = OTHER; note = adenosine-3'-phosphate
  modified_base 4: mod_base = OTHER; note = guanosine-3'-phosphate
  modified_base 5: mod_base = OTHER; note = guanosine-3'-phosphate
  modified_base 6: mod_base = OTHER; note = uridine-3'-phosphate
  modified_base 7: mod_base = OTHER; note = guanosine-3'-phosphate
  modified_base 8: mod_base = OTHER; note = uridine-3'-phosphate
  modified_base 9: mod_base = OTHER; note = guanosine-3'-phosphate
  modified_base 10: mod_base = OTHER; note = adenosine-3'-phosphate
  modified_base 11: mod_base = OTHER; note = uridine-3'-phosphate
  modified_base 12: mod_base = OTHER; note = cytidine-3'-phosphate
  modified_base 13: mod_base = OTHER; note = adenosine-3'-phosphate
  modified_base 14: mod_base = OTHER; note = guanosine-3'-phosphate
  modified_base 15: mod_base = OTHER; note = cytidine-3'-phosphate
  modified_base 16: mod_base = OTHER; note = uridine-3'-phosphate
  modified_base 17: mod_base = OTHER; note = guanosine-3'-phosphate
  modified_base 18: mod_base = OTHER; note = guanosine-3'-phosphate
  modified_base 19: mod_base = OTHER; note = adenosine-3'-phosphate
  misc_feature 1..19: note = RNA
  misc_feature 20..21: note = DNA
acaggtgtgatcagctggatt

SEQ ID NO: 988 - DNA, 21 bp, synthetic construct
  source 1..21: mol_type = other DNA
  modified_base 1: mod_base = OTHER; note = uridine-3'-phosphate
  modified_base 2: mod_base = OTHER; note = cytidine-3'-phosphate
  modified_base 3: mod_base = OTHER; note = adenosine-3'-phosphate
  modified_base 4: mod_base = OTHER; note = guanosine-3'-phosphate
  modified_base 5: mod_base = OTHER; note = cytidine-3'-phosphate
  modified_base 6: mod_base = OTHER; note = uridine-3'-phosphate
  modified_base 7: mod_base = OTHER; note = guanosine-3'-phosphate
  modified_base 8: mod_base = OTHER; note = guanosine-3'-phosphate
  modified_base 9: mod_base = OTHER; note = adenosine-3'-phosphate
  modified_base 10: mod_base = OTHER; note = uridine-3'-phosphate
  modified_base 11: mod_base = OTHER; note = cytidine-3'-phosphate
  modified_base 12: mod_base = OTHER; note = cytidine-3'-phosphate
  modified_base 13: mod_base = OTHER; note = adenosine-3'-phosphate
  modified_base 14: mod_base = OTHER; note = guanosine-3'-phosphate
  modified_base 15: mod_base = OTHER; note = cytidine-3'-phosphate
  modified_base 16: mod_base = OTHER; note = adenosine-3'-phosphate
  modified_base 17: mod_base = OTHER; note = adenosine-3'-phosphate
  modified_base 18: mod_base = OTHER; note = guanosine-3'-phosphate
  modified_base 19: mod_base = OTHER; note = uridine-3'-phosphate
  misc_feature 1..19: note = RNA
  misc_feature 20..21: note = DNA
tcagctggatccagcaagttt

SEQ ID NO: 989 - DNA, 21 bp, synthetic construct
  source 1..21: mol_type = other DNA
  modified_base 1: mod_base = OTHER; note = cytidine-3'-phosphate
  modified_base 2: mod_base = OTHER; note = adenosine-3'-phosphate
  modified_base 3: mod_base = OTHER; note = guanosine-3'-phosphate
  modified_base 4: mod_base = OTHER; note = cytidine-3'-phosphate
  modified_base 5: mod_base = OTHER; note = adenosine-3'-phosphate
  modified_base 6: mod_base = OTHER; note = adenosine-3'-phosphate
  modified_base 7: mod_base = OTHER; note = guanosine-3'-phosphate
  modified_base 8: mod_base = OTHER; note = uridine-3'-phosphate
  modified_base 9: mod_base = OTHER; note = guanosine-3'-phosphate
  modified_base 10: mod_base = OTHER; note = guanosine-3'-phosphate
  modified_base 11: mod_base = OTHER; note = uridine-3'-phosphate
  modified_base 12: mod_base = OTHER; note = guanosine-3'-phosphate
  modified_base 13: mod_base = OTHER; note = adenosine-3'-phosphate
  modified_base 14: mod_base = OTHER; note = cytidine-3'-phosphate
  modified_base 15: mod_base = OTHER; note = cytidine-3'-phosphate
  modified_base 16: mod_base = OTHER; note = uridine-3'-phosphate
  modified_base 17: mod_base = OTHER; note = guanosine-3'-phosphate
  modified_base 18: mod_base = OTHER; note = adenosine-3'-phosphate
  modified_base 19: mod_base = OTHER; note = guanosine-3'-phosphate
  misc_feature 1..19: note = RNA
  misc_feature 20..21: note = DNA
cagcaagtggtgacctgagtt

SEQ ID NO: 990 - DNA, 21 bp, synthetic construct
  source 1..21: mol_type = other DNA
  modified_base 1: mod_base = OTHER; note = uridine-3'-phosphate
  modified_base 2: mod_base = OTHER; note = guanosine-3'-phosphate
  modified_base 3: mod_base = OTHER; note = adenosine-3'-phosphate
  modified_base 4: mod_base = OTHER; note = cytidine-3'-phosphate
  modified_base 5: mod_base = OTHER; note = cytidine-3'-phosphate
  modified_base 6: mod_base = OTHER; note = uridine-3'-phosphate
  modified_base 7: mod_base = OTHER; note = guanosine-3'-phosphate
  modified_base 8: mod_base = OTHER; note = adenosine-3'-phosphate
  modified_base 9: mod_base = OTHER; note = guanosine-3'-phosphate
  modified_base 10: mod_base = OTHER; note = guanosine-3'-phosphate
  modified_base 11: mod_base = OTHER; note = adenosine-3'-phosphate
  modified_base 12: mod_base = OTHER; note = adenosine-3'-phosphate
  modified_base 13: mod_base = OTHER; note = cytidine-3'-phosphate
  modified_base 14: mod_base = OTHER; note = uridine-3'-phosphate
  modified_base 15: mod_base = OTHER; note = guanosine-3'-phosphate
  modified_base 16: mod_base = OTHER; note = cytidine-3'-phosphate
  modified_base 17: mod_base = OTHER; note = cytidine-3'-phosphate
  modified_base 18: mod_base = OTHER; note = cytidine-3'-phosphate
  modified_base 19: mod_base = OTHER; note = cytidine-3'-phosphate
  misc_feature 1..19: note = RNA
  misc_feature 20..21: note = DNA
tgacctgaggaactgcccctt

SEQ ID NO: 991 - DNA, 21 bp, synthetic construct
  source 1..21: mol_type = other DNA
  modified_base 1: mod_base = OTHER; note = guanosine-3'-phosphate
  modified_base 2: mod_base = OTHER; note = guanosine-3'-phosphate
  modified_base 3: mod_base = OTHER; note = adenosine-3'-phosphate
  modified_base 4: mod_base = OTHER; note = adenosine-3'-phosphate
  modified_base 5: mod_base = OTHER; note = cytidine-3'-phosphate
  modified_base 6: mod_base = OTHER; note = uridine-3'-phosphate
  modified_base 7: mod_base = OTHER; note = guanosine-3'-phosphate
  modified_base 8: mod_base = OTHER; note = cytidine-3'-phosphate
  modified_base 9: mod_base = OTHER; note = cytidine-3'-phosphate
  modified_base 10: mod_base = OTHER; note = cytidine-3'-phosphate
  modified_base 11: mod_base = OTHER; note = cytidine-3'-phosphate
  modified_base 12: mod_base = OTHER; note = cytidine-3'-phosphate
  modified_base 13: mod_base = OTHER; note = cytidine-3'-phosphate
  modified_base 14: mod_base = OTHER; note = uridine-3'-phosphate
  modified_base 15: mod_base = OTHER; note = guanosine-3'-phosphate
  modified_base 16: mod_base = OTHER; note = cytidine-3'-phosphate
  modified_base 17: mod_base = OTHER; note = adenosine-3'-phosphate
  modified_base 18: mod_base = OTHER; note = adenosine-3'-phosphate
  modified_base 19: mod_base = OTHER; note = adenosine-3'-phosphate
  misc_feature 1..19: note = RNA
  misc_feature 20..21: note = DNA
ggaactgcccccctgcaaatt

SEQ ID NO: 992 - DNA, 21 bp, synthetic construct
  source 1..21: mol_type = other DNA
  modified_base 1: mod_base = OTHER; note = cytidine-3'-phosphate
  modified_base 2: mod_base = OTHER; note = uridine-3'-phosphate
  modified_base 3: mod_base = OTHER; note = guanosine-3'-phosphate
  modified_base 4: mod_base = OTHER; note = cytidine-3'-phosphate
  modified_base 5: mod_base = OTHER; note = adenosine-3'-phosphate
  modified_base 6: mod_base = OTHER; note = adenosine-3'-phosphate
  modified_base 7: mod_base = OTHER; note = adenosine-3'-phosphate
  modified_base 8: mod_base = OTHER; note = guanosine-3'-phosphate
  modified_base 9: mod_base = OTHER; note = cytidine-3'-phosphate
  modified_base 10: mod_base = OTHER; note = adenosine-3'-phosphate
  modified_base 11: mod_base = OTHER; note = guanosine-3'-phosphate
  modified_base 12: mod_base = OTHER; note = guanosine-3'-phosphate
  modified_base 13: mod_base = OTHER; note = guanosine-3'-phosphate
  modified_base 14: mod_base = OTHER; note = cytidine-3'-phosphate
  modified_base 15: mod_base = OTHER; note = cytidine-3'-phosphate
  modified_base 16: mod_base = OTHER; note = cytidine-3'-phosphate
  modified_base 17: mod_base = OTHER; note = adenosine-3'-phosphate
  modified_base 18: mod_base = OTHER; note = cytidine-3'-phosphate
  modified_base 19: mod_base = OTHER; note = cytidine-3'-phosphate
  misc_feature 1..19: note = RNA
  misc_feature 20..21: note = DNA
ctgcaaagcagggcccacctt

SEQ ID NO: 993 - DNA, 21 bp, synthetic construct
  source 1..21: mol_type = other DNA
  modified_base 1: mod_base = OTHER; note = guanosine-3'-phosphate
  modified_base 2: mod_base = OTHER; note = cytidine-3'-phosphate
  modified_base 3: mod_base = OTHER; note = adenosine-3'-phosphate
  modified_base 4: mod_base = OTHER; note = guanosine-3'-phosphate
  modified_base 5: mod_base = OTHER; note = guanosine-3'-phosphate
  modified_base 6: mod_base = OTHER; note = guanosine-3'-phosphate
  modified_base 7: mod_base = OTHER; note = cytidine-3'-phosphate
  modified_base 8: mod_base = OTHER; note = cytidine-3'-phosphate
  modified_base 9: mod_base = OTHER; note = cytidine-3'-phosphate
  modified_base 10: mod_base = OTHER; note = adenosine-3'-phosphate
  modified_base 11: mod_base = OTHER; note = cytidine-3'-phosphate
  modified_base 12: mod_base = OTHER; note = cytidine-3'-phosphate
  modified_base 13: mod_base = OTHER; note = uridine-3'-phosphate
  modified_base 14: mod_base = OTHER; note = cytidine-3'-phosphate
  modified_base 15: mod_base = OTHER; note = cytidine-3'-phosphate
  modified_base 16: mod_base = OTHER; note = uridine-3'-phosphate
  modified_base 17: mod_base = OTHER; note = guanosine-3'-phosphate
  modified_base 18: mod_base = OTHER; note = guanosine-3'-phosphate
  modified_base 19: mod_base = OTHER; note = adenosine-3'-phosphate
  misc_feature 1..19: note = RNA
  misc_feature 20..21: note = DNA
gcagggcccacctcctggatt

SEQ ID NO: 994 - DNA, 21 bp, synthetic construct
  source 1..21: mol_type = other DNA
  modified_base 1: mod_base = OTHER; note = cytidine-3'-phosphate
  modified_base 2: mod_base = OTHER; note = cytidine-3'-phosphate
  modified_base 3: mod_base = OTHER; note = uridine-3'-phosphate
  modified_base 4: mod_base = OTHER; note = cytidine-3'-phosphate
  modified_base 5: mod_base = OTHER; note = cytidine-3'-phosphate
  modified_base 6: mod_base = OTHER; note = uridine-3'-phosphate
  modified_base 7: mod_base = OTHER; note = guanosine-3'-phosphate
  modified_base 8: mod_base = OTHER; note = guanosine-3'-phosphate
  modified_base 9: mod_base = OTHER; note = adenosine-3'-phosphate
  modified_base 10: mod_base = OTHER; note = cytidine-3'-phosphate
  modified_base 11: mod_base = OTHER; note = uridine-3'-phosphate
  modified_base 12: mod_base = OTHER; note = cytidine-3'-phosphate
  modified_base 13: mod_base = OTHER; note = adenosine-3'-phosphate
  modified_base 14: mod_base = OTHER; note = guanosine-3'-phosphate
  modified_base 15: mod_base = OTHER; note = adenosine-3'-phosphate
  modified_base 16: mod_base = OTHER; note = guanosine-3'-phosphate
  modified_base 17: mod_base = OTHER; note = adenosine-3'-phosphate
  modified_base 18: mod_base = OTHER; note = guanosine-3'-phosphate
  modified_base 19: mod_base = OTHER; note = cytidine-3'-phosphate
  misc_feature 1..19: note = RNA
  misc_feature 20..21: note = DNA
cctcctggactcagagagctt

SEQ ID NO: 995 - DNA, 21 bp, synthetic construct
  source 1..21: mol_type = other DNA
  modified_base 1: mod_base = OTHER; note = cytidine-3'-phosphate
  modified_base 2: mod_base = OTHER; note = uridine-3'-phosphate
  modified_base 3: mod_base = OTHER; note = cytidine-3'-phosphate
  modified_base 4: mod_base = OTHER; note = adenosine-3'-phosphate
  modified_base 5: mod_base = OTHER; note = guanosine-3'-phosphate
  modified_base 6: mod_base = OTHER; note = adenosine-3'-phosphate
  modified_base 7: mod_base = OTHER; note = guanosine-3'-phosphate
  modified_base 8: mod_base = OTHER; note = adenosine-3'-phosphate
  modified_base 9: mod_base = OTHER; note = guanosine-3'-phosphate
  modified_base 10: mod_base = OTHER; note = cytidine-3'-phosphate
  modified_base 11: mod_base = OTHER; note = cytidine-3'-phosphate
  modified_base 12: mod_base = OTHER; note = cytidine-3'-phosphate
  modified_base 13: mod_base = OTHER; note = adenosine-3'-phosphate
  modified_base 14: mod_base = OTHER; note = guanosine-3'-phosphate
  modified_base 15: mod_base = OTHER; note = guanosine-3'-phosphate
  modified_base 16: mod_base = OTHER; note = guanosine-3'-phosphate
  modified_base 17: mod_base = OTHER; note = cytidine-3'-phosphate
  modified_base 18: mod_base = OTHER; note = adenosine-3'-phosphate
  modified_base 19: mod_base = OTHER; note = adenosine-3'-phosphate
  misc_feature 1..19: note = RNA
  misc_feature 20..21: note = DNA
ctcagagagcccagggcaatt

SEQ ID NO: 996 - DNA, 21 bp, synthetic construct
  source 1..21: mol_type = other DNA
  modified_base 1: mod_base = OTHER; note = cytidine-3'-phosphate
  modified_base 2: mod_base = OTHER; note = cytidine-3'-phosphate
  modified_base 3: mod_base = OTHER; note = adenosine-3'-phosphate
  modified_base 4: mod_base = OTHER; note = guanosine-3'-phosphate
  modified_base 5: mod_base = OTHER; note = guanosine-3'-phosphate
  modified_base 6: mod_base = OTHER; note = guanosine-3'-phosphate
  modified_base 7: mod_base = OTHER; note = cytidine-3'-phosphate
  modified_base 8: mod_base = OTHER; note = adenosine-3'-phosphate
  modified_base 9: mod_base = OTHER; note = adenosine-3'-phosphate
  modified_base 10: mod_base = OTHER; note = cytidine-3'-phosphate
  modified_base 11: mod_base = OTHER; note = uridine-3'-phosphate
  modified_base 12: mod_base = OTHER; note = guanosine-3'-phosphate
  modified_base 13: mod_base = OTHER; note = cytidine-3'-phosphate
  modified_base 14: mod_base = OTHER; note = cytidine-3'-phosphate
  modified_base 15: mod_base = OTHER; note = adenosine-3'-phosphate
  modified_base 16: mod_base = OTHER; note = adenosine-3'-phosphate
  modified_base 17: mod_base = OTHER; note = guanosine-3'-phosphate
  modified_base 18: mod_base = OTHER; note = cytidine-3'-phosphate
  modified_base 19: mod_base = OTHER; note = adenosine-3'-phosphate
  misc_feature 1..19: note = RNA
  misc_feature 20..21: note = DNA
ccagggcaactgccaagcatt

SEQ ID NO: 997 - DNA, 21 bp, synthetic construct
  source 1..21: mol_type = other DNA
  modified_base 1: mod_base = OTHER; note = guanosine-3'-phosphate
  modified_base 2: mod_base = OTHER; note = guanosine-3'-phosphate
  modified_base 3: mod_base = OTHER; note = adenosine-3'-phosphate
  modified_base 4: mod_base = OTHER; note = cytidine-3'-phosphate
  modified_base 5: mod_base = OTHER; note = adenosine-3'-phosphate
  modified_base 6: mod_base = OTHER; note = adenosine-3'-phosphate
  modified_base 7: mod_base = OTHER; note = guanosine-3'-phosphate
  modified_base 8: mod_base = OTHER; note = uridine-3'-phosphate
  modified_base 9: mod_base = OTHER; note = adenosine-3'-phosphate
  modified_base 10: mod_base = OTHER; note = uridine-3'-phosphate
  modified_base 11: mod_base = OTHER; note = uridine-3'-phosphate
  modified_base 12: mod_base = OTHER; note = cytidine-3'-phosphate
  modified_base 13: mod_base = OTHER; note = uridine-3'-phosphate
  modified_base 14: mod_base = OTHER; note = guanosine-3'-phosphate
  modified_base 15: mod_base = OTHER; note = guanosine-3'-phosphate
  modified_base 16: mod_base = OTHER; note = cytidine-3'-phosphate
  modified_base 17: mod_base = OTHER; note = guanosine-3'-phosphate
  modified_base 18: mod_base = OTHER; note = guanosine-3'-phosphate
  modified_base 19: mod_base = OTHER; note = guanosine-3'-phosphate
  misc_feature 1..19: note = RNA
  misc_feature 20..21: note = DNA
ggacaagtattctggcgggtt

SEQ ID NO: 998 - DNA, 21 bp, synthetic construct
  source 1..21: mol_type = other DNA
  modified_base 1: mod_base = OTHER; note = cytidine-3'-phosphate
  modified_base 2: mod_base = OTHER; note = uridine-3'-phosphate
  modified_base 3: mod_base = OTHER; note = guanosine-3'-phosphate
  modified_base 4: mod_base = OTHER; note = guanosine-3'-phosphate
  modified_base 5: mod_base = OTHER; note = cytidine-3'-phosphate
  modified_base 6: mod_base = OTHER; note = guanosine-3'-phosphate
  modified_base 7: mod_base = OTHER; note = guanosine-3'-phosphate
  modified_base 8: mod_base = OTHER; note = guanosine-3'-phosphate
  modified_base 9: mod_base = OTHER; note = guanosine-3'-phosphate
  modified_base 10: mod_base = OTHER; note = guanosine-3'-phosphate
  modified_base 11: mod_base = OTHER; note = guanosine-3'-phosphate
  modified_base 12: mod_base = OTHER; note = uridine-3'-phosphate
  modified_base 13: mod_base = OTHER; note = guanosine-3'-phosphate
  modified_base 14: mod_base = OTHER; note = guanosine-3'-phosphate
  modified_base 15: mod_base = OTHER; note = guanosine-3'-phosphate
  modified_base 16: mod_base = OTHER; note = guanosine-3'-phosphate
  modified_base 17: mod_base = OTHER; note = guanosine-3'-phosphate
  modified_base 18: mod_base = OTHER; note = adenosine-3'-phosphate
  modified_base 19: mod_base = OTHER; note = guanosine-3'-phosphate
  misc_feature 1..19: note = RNA
  misc_feature 20..21: note = DNA
ctggcggggggtgggggagtt

SEQ ID NO: 999 - DNA, 21 bp, synthetic construct
  source 1..21: mol_type = other DNA
  modified_base 1: mod_base = OTHER; note = guanosine-3'-phosphate
  modified_base 2: mod_base = OTHER; note = guanosine-3'-phosphate
  modified_base 3: mod_base = OTHER; note = guanosine-3'-phosphate
  modified_base 4: mod_base = OTHER; note = uridine-3'-phosphate
  modified_base 5: mod_base = OTHER; note = guanosine-3'-phosphate
  modified_base 6: mod_base = OTHER; note = guanosine-3'-phosphate
  modified_base 7: mod_base = OTHER; note = guanosine-3'-phosphate
  modified_base 8: mod_base = OTHER; note = guanosine-3'-phosphate
  modified_base 9: mod_base = OTHER; note = guanosine-3'-phosphate
  modified_base 10: mod_base = OTHER; note = adenosine-3'-phosphate
  modified_base 11: mod_base = OTHER; note = guanosine-3'-phosphate
  modified_base 12: mod_base = OTHER; note = adenosine-3'-phosphate
  modified_base 13: mod_base = OTHER; note = guanosine-3'-phosphate
  modified_base 14: mod_base = OTHER; note = adenosine-3'-phosphate
  modified_base 15: mod_base = OTHER; note = guanosine-3'-phosphate
  modified_base 16: mod_base = OTHER; note = cytidine-3'-phosphate
  modified_base 17: mod_base = OTHER; note = adenosine-3'-phosphate
  modified_base 18: mod_base = OTHER; note = guanosine-3'-phosphate
  modified_base 19: mod_base = OTHER; note = guanosine-3'-phosphate
  misc_feature 1..19: note = RNA
  misc_feature 20..21: note = DNA
gggtgggggagagagcaggtt

SEQ ID NO: 1000 - DNA, 21 bp, synthetic construct
  source 1..21: mol_type = other DNA
  modified_base 1: mod_base = OTHER; note = adenosine-3'-phosphate
  modified_base 2: mod_base = OTHER; note = guanosine-3'-phosphate
  modified_base 3: mod_base = OTHER; note = adenosine-3'-phosphate
  modified_base 4: mod_base = OTHER; note = guanosine-3'-phosphate
  modified_base 5: mod_base = OTHER; note = adenosine-3'-phosphate
  modified_base 6: mod_base = OTHER; note = guanosine-3'-phosphate
  modified_base 7: mod_base = OTHER; note = cytidine-3'-phosphate
  modified_base 8: mod_base = OTHER; note = adenosine-3'-phosphate
  modified_base 9: mod_base = OTHER; note = guanosine-3'-phosphate
  modified_base 10: mod_base = OTHER; note = guanosine-3'-phosphate
  modified_base 11: mod_base = OTHER; note = cytidine-3'-phosphate
  modified_base 12: mod_base = OTHER; note = cytidine-3'-phosphate
  modified_base 13: mod_base = OTHER; note = cytidine-3'-phosphate
  modified_base 14: mod_base = OTHER; note = uridine-3'-phosphate
  modified_base 15: mod_base = OTHER; note = guanosine-3'-phosphate
  modified_base 16: mod_base = OTHER; note = uridine-3'-phosphate
  modified_base 17: mod_base = OTHER; note = guanosine-3'-phosphate
  modified_base 18: mod_base = OTHER; note = guanosine-3'-phosphate
  modified_base 19: mod_base = OTHER; note = uridine-3'-phosphate
  misc_feature 1..19: note = RNA
  misc_feature 20..21: note = DNA
agagagcaggccctgtggttt

SEQ ID NO: 1001 - DNA, 21 bp, synthetic construct
  source 1..21: mol_type = other DNA
  modified_base 1: mod_base = OTHER; note = cytidine-3'-phosphate
  modified_base 2: mod_base = OTHER; note = cytidine-3'-phosphate
  modified_base 3: mod_base = OTHER; note = cytidine-3'-phosphate
  modified_base 4: mod_base = OTHER; note = uridine-3'-phosphate
  modified_base 5: mod_base = OTHER; note = guanosine-3'-phosphate
  modified_base 6: mod_base = OTHER; note = uridine-3'-phosphate
  modified_base 7: mod_base = OTHER; note = guanosine-3'-phosphate
  modified_base 8: mod_base = OTHER; note = guanosine-3'-phosphate
  modified_base 9: mod_base = OTHER; note = uridine-3'-phosphate
  modified_base 10: mod_base = OTHER; note = guanosine-3'-phosphate
  modified_base 11: mod_base = OTHER; note = guanosine-3'-phosphate
  modified_base 12: mod_base = OTHER; note = cytidine-3'-phosphate
  modified_base 13: mod_base = OTHER; note = adenosine-3'-phosphate
  modified_base 14: mod_base = OTHER; note = guanosine-3'-phosphate
  modified_base 15: mod_base = OTHER; note = guanosine-3'-phosphate
  modified_base 16: mod_base = OTHER; note = adenosine-3'-phosphate
  modified_base 17: mod_base = OTHER; note = guanosine-3'-phosphate
  modified_base 18: mod_base = OTHER; note = guanosine-3'-phosphate
  modified_base 19: mod_base = OTHER; note = uridine-3'-phosphate
  misc_feature 1..19: note = RNA
  misc_feature 20..21: note = DNA
ccctgtggtggcaggaggttt

SEQ ID NO: 1002 - DNA, 21 bp, synthetic construct
  source 1..21: mol_type = other DNA
  modified_base 1: mod_base = OTHER; note = guanosine-3'-phosphate
  modified_base 2: mod_base = OTHER; note = guanosine-3'-phosphate
  modified_base 3: mod_base = OTHER; note = adenosine-3'-phosphate
  modified_base 4: mod_base = OTHER; note = guanosine-3'-phosphate
  modified_base 5: mod_base = OTHER; note = guanosine-3'-phosphate
  modified_base 6: mod_base = OTHER; note = uridine-3'-phosphate
  modified_base 7: mod_base = OTHER; note = guanosine-3'-phosphate
  modified_base 8: mod_base = OTHER; note = guanosine-3'-phosphate
  modified_base 9: mod_base = OTHER; note = cytidine-3'-phosphate
  modified_base 10: mod_base = OTHER; note = adenosine-3'-phosphate
  modified_base 11: mod_base = OTHER; note = uridine-3'-phosphate
  modified_base 12: mod_base = OTHER; note = cytidine-3'-phosphate
  modified_base 13: mod_base = OTHER; note = uridine-3'-phosphate
  modified_base 14: mod_base = OTHER; note = uridine-3'-phosphate
  modified_base 15: mod_base = OTHER; note = guanosine-3'-phosphate
  modified_base 16: mod_base = OTHER; note = uridine-3'-phosphate
  modified_base 17: mod_base = OTHER; note = cytidine-3'-phosphate
  modified_base 18: mod_base = OTHER; note = uridine-3'-phosphate
  modified_base 19: mod_base = OTHER; note = cytidine-3'-phosphate
  misc_feature 1..19: note = RNA
  misc_feature 20..21: note = DNA
ggaggtggcatcttgtctctt

SEQ ID NO: 1003 - DNA, 21 bp, synthetic construct
  source 1..21: mol_type = other DNA
  modified_base 1: mod_base = OTHER; note = cytidine-3'-phosphate
  modified_base 2: mod_base = OTHER; note = adenosine-3'-phosphate
  modified_base 3: mod_base = OTHER; note = uridine-3'-phosphate
  modified_base 4: mod_base = OTHER; note = cytidine-3'-phosphate
  modified_base 5: mod_base = OTHER; note = uridine-3'-phosphate
  modified_base 6: mod_base = OTHER; note = uridine-3'-phosphate
  modified_base 7: mod_base = OTHER; note = guanosine-3'-phosphate
  modified_base 8: mod_base = OTHER; note = uridine-3'-phosphate
  modified_base 9: mod_base = OTHER; note = cytidine-3'-phosphate
  modified_base 10: mod_base = OTHER; note = uridine-3'-phosphate
  modified_base 11: mod_base = OTHER; note = cytidine-3'-phosphate
  modified_base 12: mod_base = OTHER; note = guanosine-3'-phosphate
  modified_base 13: mod_base = OTHER; note = uridine-3'-phosphate
  modified_base 14: mod_base = OTHER; note = cytidine-3'-phosphate
  modified_base 15: mod_base = OTHER; note = cytidine-3'-phosphate
  modified_base 16: mod_base = OTHER; note = cytidine-3'-phosphate
  modified_base 17: mod_base = OTHER; note = uridine-3'-phosphate
  modified_base 18: mod_base = OTHER; note = guanosine-3'-phosphate
  modified_base 19: mod_base = OTHER; note = adenosine-3'-phosphate
  misc_feature 1..19: note = RNA
  misc_feature 20..21: note = DNA
catcttgtctcgtccctgatt

SEQ ID NO: 1004 - DNA, 21 bp, synthetic construct
  source 1..21: mol_type = other DNA
  modified_base 1: mod_base = OTHER; note = cytidine-3'-phosphate
  modified_base 2: mod_base = OTHER; note = cytidine-3'-phosphate
  modified_base 3: mod_base = OTHER; note = cytidine-3'-phosphate
  modified_base 4: mod_base = OTHER; note = uridine-3'-phosphate
  modified_base 5: mod_base = OTHER; note = guanosine-3'-phosphate
  modified_base 6: mod_base = OTHER; note = adenosine-3'-phosphate
  modified_base 7: mod_base = OTHER; note = uridine-3'-phosphate
  modified_base 8: mod_base = OTHER; note = guanosine-3'-phosphate
  modified_base 9: mod_base = OTHER; note = uridine-3'-phosphate
  modified_base 10: mod_base = OTHER; note = cytidine-3'-phosphate
  modified_base 11: mod_base = OTHER; note = uridine-3'-phosphate
  modified_base 12: mod_base = OTHER; note = guanosine-3'-phosphate
  modified_base 13: mod_base = OTHER; note = cytidine-3'-phosphate
  modified_base 14: mod_base = OTHER; note = uridine-3'-phosphate
  modified_base 15: mod_base = OTHER; note = cytidine-3'-phosphate
  modified_base 16: mod_base = OTHER; note = cytidine-3'-phosphate
  modified_base 17: mod_base = OTHER; note = adenosine-3'-phosphate
  modified_base 18: mod_base = OTHER; note = guanosine-3'-phosphate
  modified_base 19: mod_base = OTHER; note = uridine-3'-phosphate
  misc_feature 1..19: note = RNA
  misc_feature 20..21: note = DNA
ccctgatgtctgctccagttt

SEQ ID NO: 1005 - DNA, 21 bp, synthetic construct
  source 1..21: mol_type = other DNA
  modified_base 1: mod_base = OTHER; note = cytidine-3'-phosphate
  modified_base 2: mod_base = OTHER; note = uridine-3'-phosphate
  modified_base 3: mod_base = OTHER; note = guanosine-3'-phosphate
  modified_base 4: mod_base = OTHER; note = cytidine-3'-phosphate
  modified_base 5: mod_base = OTHER; note = uridine-3'-phosphate
  modified_base 6: mod_base = OTHER; note = cytidine-3'-phosphate
  modified_base 7: mod_base = OTHER; note = cytidine-3'-phosphate
  modified_base 8: mod_base = OTHER; note = adenosine-3'-phosphate
  modified_base 9: mod_base = OTHER; note = guanosine-3'-phosphate
  modified_base 10: mod_base = OTHER; note = uridine-3'-phosphate
  modified_base 11: mod_base = OTHER; note = guanosine-3'-phosphate
  modified_base 12: mod_base = OTHER; note = adenosine-3'-phosphate
  modified_base 13: mod_base = OTHER; note = uridine-3'-phosphate
  modified_base 14: mod_base = OTHER; note = guanosine-3'-phosphate
  modified_base 15: mod_base = OTHER; note = guanosine-3'-phosphate
  modified_base 16: mod_base = OTHER; note = cytidine-3'-phosphate
  modified_base 17: mod_base = OTHER; note = adenosine-3'-phosphate
  modified_base 18: mod_base = OTHER; note = guanosine-3'-phosphate
  modified_base 19: mod_base = OTHER; note = guanosine-3'-phosphate
  misc_feature 1..19: note = RNA
  misc_feature 20..21: note = DNA
ctgctccagtgatggcaggtt

SEQ ID NO: 1006 - DNA, 21 bp, synthetic construct
  source 1..21: mol_type = other DNA
  modified_base 1: mod_base = OTHER; note = adenosine-3'-phosphate
  modified_base 2: mod_base = OTHER; note = uridine-3'-phosphate
  modified_base 3: mod_base = OTHER; note = guanosine-3'-phosphate
  modified_base 4: mod_base = OTHER; note = guanosine-3'-phosphate
  modified_base 5: mod_base = OTHER; note = cytidine-3'-phosphate
  modified_base 6: mod_base = OTHER; note = adenosine-3'-phosphate
  modified_base 7: mod_base = OTHER; note = guanosine-3'-phosphate
  modified_base 8: mod_base = OTHER; note = guanosine-3'-phosphate
  modified_base 9: mod_base = OTHER; note = adenosine-3'-phosphate
  modified_base 10: mod_base = OTHER; note = guanosine-3'-phosphate
  modified_base 11: mod_base = OTHER; note = guanosine-3'-phosphate
  modified_base 12: mod_base = OTHER; note = adenosine-3'-phosphate
  modified_base 13: mod_base = OTHER; note = uridine-3'-phosphate
  modified_base 14: mod_base = OTHER; note = guanosine-3'-phosphate
  modified_base 15: mod_base = OTHER; note = guanosine-3'-phosphate
  modified_base 16: mod_base = OTHER; note = adenosine-3'-phosphate
  modified_base 17: mod_base = OTHER; note = guanosine-3'-phosphate
  modified_base 18: mod_base = OTHER; note = adenosine-3'-phosphate
  modified_base 19: mod_base = OTHER; note = adenosine-3'-phosphate
  misc_feature 1..19: note = RNA
  misc_feature 20..21: note = DNA
atggcaggaggatggagaatt

SEQ ID NO: 1007 - DNA, 21 bp, synthetic construct
  source 1..21: mol_type = other DNA
  modified_base 1: mod_base = OTHER; note = guanosine-3'-phosphate
  modified_base 2: mod_base = OTHER; note = guanosine-3'-phosphate
  modified_base 3: mod_base = OTHER; note = adenosine-3'-phosphate
  modified_base 4: mod_base = OTHER; note = uridine-3'-phosphate
  modified_base 5: mod_base = OTHER; note = guanosine-3'-phosphate
  modified_base 6: mod_base = OTHER; note = guanosine-3'-phosphate
  modified_base 7: mod_base = OTHER; note = adenosine-3'-phosphate
  modified_base 8: mod_base = OTHER; note = guanosine-3'-phosphate
  modified_base 9: mod_base = OTHER; note = adenosine-3'-phosphate
  modified_base 10: mod_base = OTHER; note = adenosine-3'-phosphate
  modified_base 11: mod_base = OTHER; note = guanosine-3'-phosphate
  modified_base 12: mod_base = OTHER; note = uridine-3'-phosphate
  modified_base 13: mod_base = OTHER; note = guanosine-3'-phosphate
  modified_base 14: mod_base = OTHER; note = cytidine-3'-phosphate
  modified_base 15: mod_base = OTHER; note = cytidine-3'-phosphate
  modified_base 16: mod_base = OTHER; note = adenosine-3'-phosphate
  modified_base 17: mod_base = OTHER; note = guanosine-3'-phosphate
  modified_base 18: mod_base = OTHER; note = cytidine-3'-phosphate
  modified_base 19: mod_base = OTHER; note = adenosine-3'-phosphate
  misc_feature 1..19: note = RNA
  misc_feature 20..21: note = DNA
ggatggagaagtgccagcatt

SEQ ID NO: 1008 - DNA, 21 bp, synthetic construct
  source 1..21: mol_type = other DNA
  modified_base 1: mod_base = OTHER; note = uridine-3'-phosphate
  modified_base 2: mod_base = OTHER; note = guanosine-3'-phosphate
  modified_base 3: mod_base = OTHER; note = cytidine-3'-phosphate
  modified_base 4: mod_base = OTHER; note = cytidine-3'-phosphate
  modified_base 5: mod_base = OTHER; note = adenosine-3'-phosphate
  modified_base 6: mod_base = OTHER; note = guanosine-3'-phosphate
  modified_base 7: mod_base = OTHER; note = cytidine-3'-phosphate
  modified_base 8: mod_base = OTHER; note = adenosine-3'-phosphate
  modified_base 9: mod_base = OTHER; note = guanosine-3'-phosphate
  modified_base 10: mod_base = OTHER; note = cytidine-3'-phosphate
  modified_base 11: mod_base = OTHER; note = uridine-3'-phosphate
  modified_base 12: mod_base = OTHER; note = guanosine-3'-phosphate
  modified_base 13: mod_base = OTHER; note = guanosine-3'-phosphate
  modified_base 14: mod_base = OTHER; note = guanosine-3'-phosphate
  modified_base 15: mod_base = OTHER; note = guanosine-3'-phosphate
  modified_base 16: mod_base = OTHER; note = guanosine-3'-phosphate
  modified_base 17: mod_base = OTHER; note = uridine-3'-phosphate
  modified_base 18: mod_base = OTHER; note = cytidine-3'-phosphate
  modified_base 19: mod_base = OTHER; note = adenosine-3'-phosphate
  misc_feature 1..19: note = RNA
  misc_feature 20..21: note = DNA
tgccagcagctgggggtcatt

SEQ ID NO: 1009 - DNA, 21 bp, synthetic construct
  source 1..21: mol_type = other DNA
  modified_base 1: mod_base = OTHER; note = adenosine-3'-phosphate
  modified_base 2: mod_base = OTHER; note = guanosine-3'-phosphate
  modified_base 3: mod_base = OTHER; note = cytidine-3'-phosphate
  modified_base 4: mod_base = OTHER; note = uridine-3'-phosphate
  modified_base 5: mod_base = OTHER; note = guanosine-3'-phosphate
  modified_base 6: mod_base = OTHER; note = guanosine-3'-phosphate
  modified_base 7: mod_base = OTHER; note = guanosine-3'-phosphate
  modified_base 8: mod_base = OTHER; note = guanosine-3'-phosphate
  modified_base 9: mod_base = OTHER; note = guanosine-3'-phosphate
  modified_base 10: mod_base = OTHER; note = uridine-3'-phosphate
  modified_base 11: mod_base = OTHER; note = cytidine-3'-phosphate
  modified_base 12: mod_base = OTHER; note = adenosine-3'-phosphate
  modified_base 13: mod_base = OTHER; note = adenosine-3'-phosphate
  modified_base 14: mod_base = OTHER; note = guanosine-3'-phosphate
  modified_base 15: mod_base = OTHER; note = adenosine-3'-phosphate
  modified_base 16: mod_base = OTHER; note = cytidine-3'-phosphate
  modified_base 17: mod_base = OTHER; note = guanosine-3'-phosphate
  modified_base 18: mod_base = OTHER; note = uridine-3'-phosphate
  modified_base 19: mod_base = OTHER; note = cytidine-3'-phosphate
  misc_feature 1..19: note = RNA
  misc_feature 20..21: note = DNA
agctgggggtcaagacgtctt

SEQ ID NO: 1010 - DNA, 21 bp, synthetic construct
  source 1..21: mol_type = other DNA
  modified_base 1: mod_base = OTHER; note = uridine-3'-phosphate
  modified_base 2: mod_base = OTHER; note = cytidine-3'-phosphate
  modified_base 3: mod_base = OTHER; note = adenosine-3'-phosphate
  modified_base 4: mod_base = OTHER; note = adenosine-3'-phosphate
  modified_base 5: mod_base = OTHER; note = guanosine-3'-phosphate
  modified_base 6: mod_base = OTHER; note = adenosine-3'-phosphate
  modified_base 7: mod_base = OTHER; note = cytidine-3'-phosphate
  modified_base 8: mod_base = OTHER; note = guanosine-3'-phosphate
  modified_base 9: mod_base = OTHER; note = uridine-3'-phosphate
  modified_base 10: mod_base = OTHER; note = cytidine-3'-phosphate
  modified_base 11: mod_base = OTHER; note = cytidine-3'-phosphate
  modified_base 12: mod_base = OTHER; note = cytidine-3'-phosphate
  modified_base 13: mod_base = OTHER; note = cytidine-3'-phosphate
  modified_base 14: mod_base = OTHER; note = uridine-3'-phosphate
  modified_base 15: mod_base = OTHER; note = guanosine-3'-phosphate
  modified_base 16: mod_base = OTHER; note = adenosine-3'-phosphate
  modified_base 17: mod_base = OTHER; note = guanosine-3'-phosphate
  modified_base 18: mod_base = OTHER; note = guanosine-3'-phosphate
  modified_base 19: mod_base = OTHER; note = adenosine-3'-phosphate
  misc_feature 1..19: note = RNA
  misc_feature 20..21: note = DNA
tcaagacgtcccctgaggatt

SEQ ID NO: 1011 - DNA, 21 bp, synthetic construct
  source 1..21: mol_type = other DNA
  modified_base 1: mod_base = OTHER; note = cytidine-3'-phosphate
  modified_base 2: mod_base = OTHER; note = cytidine-3'-phosphate
  modified_base 3: mod_base = OTHER; note = cytidine-3'-phosphate
  modified_base 4: mod_base = OTHER; note = uridine-3'-phosphate
  modified_base 5: mod_base = OTHER; note = guanosine-3'-phosphate
  modified_base 6: mod_base = OTHER; note = adenosine-3'-phosphate
  modified_base 7: mod_base = OTHER; note = guanosine-3'-phosphate
  modified_base 8: mod_base = OTHER; note = guanosine-3'-phosphate
  modified_base 9: mod_base = OTHER; note = adenosine-3'-phosphate
  modified_base 10: mod_base = OTHER; note = cytidine-3'-phosphate
  modified_base 11: mod_base = OTHER; note = cytidine-3'-phosphate
  modified_base 12: mod_base = OTHER; note = cytidine-3'-phosphate
  modified_base 13: mod_base = OTHER; note = adenosine-3'-phosphate
  modified_base 14: mod_base = OTHER; note = guanosine-3'-phosphate
  modified_base 15: mod_base = OTHER; note = guanosine-3'-phosphate
  modified_base 16: mod_base = OTHER; note = cytidine-3'-phosphate
  modified_base 17: mod_base = OTHER; note = cytidine-3'-phosphate
  modified_base 18: mod_base = OTHER; note = cytidine-3'-phosphate
  modified_base 19: mod_base = OTHER; note = adenosine-3'-phosphate
  misc_feature 1..19: note = RNA
  misc_feature 20..21: note = DNA
ccctgaggacccaggcccatt

SEQ ID NO: 1012 - DNA, 21 bp, synthetic construct
  source 1..21: mol_type = other DNA
  modified_base 1: mod_base = OTHER; note = guanosine-3'-phosphate
  modified_base 2: mod_base = OTHER; note = cytidine-3'-phosphate
  modified_base 3: mod_base = OTHER; note = cytidine-3'-phosphate
  modified_base 4: mod_base = OTHER; note = cytidine-3'-phosphate
  modified_base 5: mod_base = OTHER; note = adenosine-3'-phosphate
  modified_base 6: mod_base = OTHER; note = cytidine-3'-phosphate
  modified_base 7: mod_base = OTHER; note = adenosine-3'-phosphate
  modified_base 8: mod_base = OTHER; note = cytidine-3'-phosphate
  modified_base 9: mod_base = OTHER; note = cytidine-3'-phosphate
  modified_base 10: mod_base = OTHER; note = cytidine-3'-phosphate
  modified_base 11: mod_base = OTHER; note = adenosine-3'-phosphate
  modified_base 12: mod_base = OTHER; note = guanosine-3'-phosphate
  modified_base 13: mod_base = OTHER; note = cytidine-3'-phosphate
  modified_base 14: mod_base = OTHER; note = cytidine-3'-phosphate
  modified_base 15: mod_base = OTHER; note = cytidine-3'-phosphate
  modified_base 16: mod_base = OTHER; note = uridine-3'-phosphate
  modified_base 17: mod_base = OTHER; note = uridine-3'-phosphate
  modified_base 18: mod_base = OTHER; note = cytidine-3'-phosphate
  modified_base 19: mod_base = OTHER; note = uridine-3'-phosphate
  misc_feature 1..19: note = RNA
  misc_feature 20..21: note = DNA
gcccacacccagcccttcttt

SEQ ID NO: 1013 - DNA, 21 bp, synthetic construct
  source 1..21: mol_type = other DNA
  modified_base 1: mod_base = OTHER; note = adenosine-3'-phosphate
  modified_base 2: mod_base = OTHER; note = guanosine-3'-phosphate
  modified_base 3: mod_base = OTHER; note = cytidine-3'-phosphate
  modified_base 4: mod_base = OTHER; note = cytidine-3'-phosphate
  modified_base 5: mod_base = OTHER; note = cytidine-3'-phosphate
  modified_base 6: mod_base = OTHER; note = uridine-3'-phosphate
  modified_base 7: mod_base = OTHER; note = uridine-3'-phosphate
  modified_base 8: mod_base = OTHER; note = cytidine-3'-phosphate
  modified_base 9: mod_base = OTHER; note = uridine-3'-phosphate
  modified_base 10: mod_base = OTHER; note = guanosine-3'-phosphate
  modified_base 11: mod_base = OTHER; note = cytidine-3'-phosphate
  modified_base 12: mod_base = OTHER; note = cytidine-3'-phosphate
  modified_base 13: mod_base = OTHER; note = uridine-3'-phosphate
  modified_base 14: mod_base = OTHER; note = cytidine-3'-phosphate
  modified_base 15: mod_base = OTHER; note = cytidine-3'-phosphate
  modified_base 16: mod_base = OTHER; note = cytidine-3'-phosphate
  modified_base 17: mod_base = OTHER; note = adenosine-3'-phosphate
  modified_base 18: mod_base = OTHER; note = adenosine-3'-phosphate
  modified_base 19: mod_base = OTHER; note = uridine-3'-phosphate
  misc_feature 1..19: note = RNA
  misc_feature 20..21: note = DNA
agcccttctgcctcccaattt

SEQ ID NO: 1014 - DNA, 21 bp, synthetic construct
  source 1..21: mol_type = other DNA
  modified_base 1: mod_base = OTHER; note = cytidine-3'-phosphate
  modified_base 2: mod_base = OTHER; note = cytidine-3'-phosphate
  modified_base 3: mod_base = OTHER; note = uridine-3'-phosphate
  modified_base 4: mod_base = OTHER; note = cytidine-3'-phosphate
  modified_base 5: mod_base = OTHER; note = cytidine-3'-phosphate
  modified_base 6: mod_base = OTHER; note = cytidine-3'-phosphate
  modified_base 7: mod_base = OTHER; note = adenosine-3'-phosphate
  modified_base 8: mod_base = OTHER; note = adenosine-3'-phosphate
  modified_base 9: mod_base = OTHER; note = uridine-3'-phosphate
  modified_base 10: mod_base = OTHER; note = uridine-3'-phosphate
  modified_base 11: mod_base = OTHER; note = cytidine-3'-phosphate
  modified_base 12: mod_base = OTHER; note = uridine-3'-phosphate
  modified_base 13: mod_base = OTHER; note = cytidine-3'-phosphate
  modified_base 14: mod_base = OTHER; note = uridine-3'-phosphate
  modified_base 15: mod_base = OTHER; note = cytidine-3'-phosphate
  modified_base 16: mod_base = OTHER; note = uridine-3'-phosphate
  modified_base 17: mod_base = OTHER; note = cytidine-3'-phosphate
  modified_base 18: mod_base = OTHER; note = cytidine-3'-phosphate
  modified_base 19: mod_base = OTHER; note = uridine-3'-phosphate
  misc_feature 1..19: note = RNA
  misc_feature 20..21: note = DNA
cctcccaattctctctccttt

SEQ ID NO: 1015 - DNA, 21 bp, synthetic construct
  source 1..21: mol_type = other DNA
  modified_base 1: mod_base = OTHER; note = cytidine-3'-phosphate
  modified_base 2: mod_base = OTHER; note = uridine-3'-phosphate
  modified_base 3: mod_base = OTHER; note = cytidine-3'-phosphate
  modified_base 4: mod_base = OTHER; note = uridine-3'-phosphate
  modified_base 5: mod_base = OTHER; note = cytidine-3'-phosphate
  modified_base 6: mod_base = OTHER; note = uridine-3'-phosphate
  modified_base 7: mod_base = OTHER; note = cytidine-3'-phosphate
  modified_base 8: mod_base = OTHER; note = cytidine-3'-phosphate
  modified_base 9: mod_base = OTHER; note = uridine-3'-phosphate
  modified_base 10: mod_base = OTHER; note = cytidine-3'-phosphate
  modified_base 11: mod_base = OTHER; note = cytidine-3'-phosphate
  modified_base 12: mod_base = OTHER; note = guanosine-3'-phosphate
  modified_base 13: mod_base = OTHER; note = uridine-3'-phosphate
  modified_base 14: mod_base = OTHER; note = cytidine-3'-phosphate
  modified_base 15: mod_base = OTHER; note = cytidine-3'-phosphate
  modified_base 16: mod_base = OTHER; note = cytidine-3'-phosphate
  modified_base 17: mod_base = OTHER; note = cytidine-3'-phosphate
  modified_base 18: mod_base = OTHER; note = uridine-3'-phosphate
  modified_base 19: mod_base = OTHER; note = uridine-3'-phosphate
  misc_feature 1..19: note = RNA
  misc_feature 20..21: note = DNA
ctctctcctccgtcccctttt

SEQ ID NO: 1016 - DNA, 21 bp, synthetic construct
  source 1..21: mol_type = other DNA
  modified_base 1: mod_base = OTHER; note = uridine-3'-phosphate
  modified_base 2: mod_base = OTHER; note = cytidine-3'-phosphate
  modified_base 3: mod_base = OTHER; note = cytidine-3'-phosphate
  modified_base 4: mod_base = OTHER; note = guanosine-3'-phosphate
  modified_base 5: mod_base = OTHER; note = uridine-3'-phosphate
  modified_base 6: mod_base = OTHER; note = cytidine-3'-phosphate
  modified_base 7: mod_base = OTHER; note = cytidine-3'-phosphate
  modified_base 8: mod_base = OTHER; note = cytidine-3'-phosphate
  modified_base 9: mod_base = OTHER; note = cytidine-3'-phosphate
  modified_base 10: mod_base = OTHER; note = uridine-3'-phosphate
  modified_base 11: mod_base = OTHER; note = uridine-3'-phosphate
  modified_base 12: mod_base = OTHER; note = cytidine-3'-phosphate
  modified_base 13: mod_base = OTHER; note = cytidine-3'-phosphate
  modified_base 14: mod_base = OTHER; note = uridine-3'-phosphate
  modified_base 15: mod_base = OTHER; note = cytidine-3'-phosphate
  modified_base 16: mod_base = OTHER; note = cytidine-3'-phosphate
  modified_base 17: mod_base = OTHER; note = adenosine-3'-phosphate
  modified_base 18: mod_base = OTHER; note = cytidine-3'-phosphate
  modified_base 19: mod_base = OTHER; note = uridine-3'-phosphate
  misc_feature 1..19: note = RNA
  misc_feature 20..21: note = DNA
tccgtccccttcctccacttt

SEQ ID NO: 1017 - DNA, 21 bp, synthetic construct
  source 1..21: mol_type = other DNA
  modified_base 1: mod_base = OTHER; note = cytidine-3'-phosphate
  modified_base 2: mod_base = OTHER; note = uridine-3'-phosphate
  modified_base 3: mod_base = OTHER; note = uridine-3'-phosphate
  modified_base 4: mod_base = OTHER; note = cytidine-3'-phosphate
  modified_base 5: mod_base = OTHER; note = cytidine-3'-phosphate
  modified_base 6: mod_base = OTHER; note = uridine-3'-phosphate
  modified_base 7: mod_base = OTHER; note = cytidine-3'-phosphate
  modified_base 8: mod_base = OTHER; note = cytidine-3'-phosphate
  modified_base 9: mod_base = OTHER; note = adenosine-3'-phosphate
  modified_base 10: mod_base = OTHER; note = cytidine-3'-phosphate
  modified_base 11: mod_base = OTHER; note = uridine-3'-phosphate
  modified_base 12: mod_base = OTHER; note = guanosine-3'-phosphate
  modified_base 13: mod_base = OTHER; note = cytidine-3'-phosphate
  modified_base 14: mod_base = OTHER; note = uridine-3'-phosphate
  modified_base 15: mod_base = OTHER; note = guanosine-3'-phosphate
  modified_base 16: mod_base = OTHER; note = cytidine-3'-phosphate
  modified_base 17: mod_base = OTHER; note = cytidine-3'-phosphate
  modified_base 18: mod_base = OTHER; note = uridine-3'-phosphate
  modified_base 19: mod_base = OTHER; note = adenosine-3'-phosphate
  misc_feature 1..19: note = RNA
  misc_feature 20..21: note = DNA
cttcctccactgctgcctatt

SEQ ID NO: 1018 - DNA, 21 bp, synthetic construct
  source 1..21: mol_type = other DNA
  modified_base 1: mod_base = OTHER; note = cytidine-3'-phosphate
  modified_base 2: mod_base = OTHER; note = uridine-3'-phosphate
  modified_base 3: mod_base = OTHER; note = guanosine-3'-phosphate
  modified_base 4: mod_base = OTHER; note = cytidine-3'-phosphate
  modified_base 5: mod_base = OTHER; note = cytidine-3'-phosphate
  modified_base 6: mod_base = OTHER; note = uridine-3'-phosphate
  modified_base 7: mod_base = OTHER; note = adenosine-3'-phosphate
  modified_base 8: mod_base = OTHER; note = adenosine-3'-phosphate
  modified_base 9: mod_base = OTHER; note = uridine-3'-phosphate
  modified_base 10: mod_base = OTHER; note = guanosine-3'-phosphate
  modified_base 11: mod_base = OTHER; note = cytidine-3'-phosphate
  modified_base 12: mod_base = OTHER; note = adenosine-3'-phosphate
  modified_base 13: mod_base = OTHER; note = adenosine-3'-phosphate
  modified_base 14: mod_base = OTHER; note = guanosine-3'-phosphate
  modified_base 15: mod_base = OTHER; note = guanosine-3'-phosphate
  modified_base 16: mod_base = OTHER; note = cytidine-3'-phosphate
  modified_base 17: mod_base = OTHER; note = adenosine-3'-phosphate
  modified_base 18: mod_base = OTHER; note = guanosine-3'-phosphate
  modified_base 19: mod_base = OTHER; note = uridine-3'-phosphate
  misc_feature 1..19: note = RNA
  misc_feature 20..21: note = DNA
ctgcctaatgcaaggcagttt

SEQ ID NO: 1019 - DNA, 21 bp, synthetic construct
  source 1..21: mol_type = other DNA
  modified_base 1: mod_base = OTHER; note = guanosine-3'-phosphate
  modified_base 2: mod_base = OTHER; note = cytidine-3'-phosphate
  modified_base 3: mod_base = OTHER; note = adenosine-3'-phosphate
  modified_base 4: mod_base = OTHER; note = adenosine-3'-phosphate
  modified_base 5: mod_base = OTHER; note = guanosine-3'-phosphate
  modified_base 6: mod_base = OTHER; note = guanosine-3'-phosphate
  modified_base 7: mod_base = OTHER; note = cytidine-3'-phosphate
  modified_base 8: mod_base = OTHER; note = adenosine-3'-phosphate
  modified_base 9: mod_base = OTHER; note = guanosine-3'-phosphate
  modified_base 10: mod_base = OTHER; note = uridine-3'-phosphate
  modified_base 11: mod_base = OTHER; note = guanosine-3'-phosphate
  modified_base 12: mod_base = OTHER; note = guanosine-3'-phosphate
  modified_base 13: mod_base = OTHER; note = cytidine-3'-phosphate
  modified_base 14: mod_base = OTHER; note = uridine-3'-phosphate
  modified_base 15: mod_base = OTHER; note = cytidine-3'-phosphate
  modified_base 16: mod_base = OTHER; note = adenosine-3'-phosphate
  modified_base 17: mod_base = OTHER; note = guanosine-3'-phosphate
  modified_base 18: mod_base = OTHER; note = cytidine-3'-phosphate
  modified_base 19: mod_base = OTHER; note = adenosine-3'-phosphate
  misc_feature 1..19: note = RNA
  misc_feature 20..21: note = DNA
gcaaggcagtggctcagcatt

SEQ ID NO: 1020 - DNA, 21 bp, synthetic construct
  source 1..21: mol_type = other DNA
  modified_base 1: mod_base = OTHER; note = uridine-3'-phosphate
  modified_base 2: mod_base = OTHER; note = guanosine-3'-phosphate
  modified_base 3: mod_base = OTHER; note = guanosine-3'-phosphate
  modified_base 4: mod_base = OTHER; note = cytidine-3'-phosphate
  modified_base 5: mod_base = OTHER; note = uridine-3'-phosphate
  modified_base 6: mod_base = OTHER; note = cytidine-3'-phosphate
  modified_base 7: mod_base = OTHER; note = adenosine-3'-phosphate
  modified_base 8: mod_base = OTHER; note = guanosine-3'-phosphate
  modified_base 9: mod_base = OTHER; note = cytidine-3'-phosphate
  modified_base 10: mod_base = OTHER; note = adenosine-3'-phosphate
  modified_base 11: mod_base = OTHER; note = guanosine-3'-phosphate
  modified_base 12: mod_base = OTHER; note = cytidine-3'-phosphate
  modified_base 13: mod_base = OTHER; note = adenosine-3'-phosphate
  modified_base 14: mod_base = OTHER; note = adenosine-3'-phosphate
  modified_base 15: mod_base = OTHER; note = guanosine-3'-phosphate
  modified_base 16: mod_base = OTHER; note = adenosine-3'-phosphate
  modified_base 17: mod_base = OTHER; note = adenosine-3'-phosphate
  modified_base 18: mod_base = OTHER; note = uridine-3'-phosphate
  modified_base 19: mod_base = OTHER; note = guanosine-3'-phosphate
  misc_feature 1..19: note = RNA
  misc_feature 20..21: note = DNA
tggctcagcagcaagaatgtt

SEQ ID NO: 1021 - DNA, 21 bp, synthetic construct
  source 1..21: mol_type = other DNA
  modified_base 1: mod_base = OTHER; note = cytidine-3'-phosphate
  modified_base 2: mod_base = OTHER; note = adenosine-3'-phosphate
  modified_base 3: mod_base = OTHER; note = adenosine-3'-phosphate
  modified_base 4: mod_base = OTHER; note = guanosine-3'-phosphate
  modified_base 5: mod_base = OTHER; note = adenosine-3'-phosphate
  modified_base 6: mod_base = OTHER; note = adenosine-3'-phosphate
  modified_base 7: mod_base = OTHER; note = uridine-3'-phosphate
  modified_base 8: mod_base = OTHER; note = guanosine-3'-phosphate
  modified_base 9: mod_base = OTHER; note = cytidine-3'-phosphate
  modified_base 10: mod_base = OTHER; note = uridine-3'-phosphate
  modified_base 11: mod_base = OTHER; note = guanosine-3'-phosphate
  modified_base 12: mod_base = OTHER; note = guanosine-3'-phosphate
  modified_base 13: mod_base = OTHER; note = uridine-3'-phosphate
  modified_base 14: mod_base = OTHER; note = uridine-3'-phosphate
  modified_base 15: mod_base = OTHER; note = cytidine-3'-phosphate
  modified_base 16: mod_base = OTHER; note = uridine-3'-phosphate
  modified_base 17: mod_base = OTHER; note = adenosine-3'-phosphate
  modified_base 18: mod_base = OTHER; note = cytidine-3'-phosphate
  modified_base 19: mod_base = OTHER; note = adenosine-3'-phosphate
  misc_feature 1..19: note = RNA
  misc_feature 20..21: note = DNA
caagaatgctggttctacatt

SEQ ID NO: 1022 - DNA, 21 bp, synthetic construct
  source 1..21: mol_type = other DNA
  modified_base 1: mod_base = OTHER; note = uridine-3'-phosphate
  modified_base 2: mod_base = OTHER; note = guanosine-3'-phosphate
  modified_base 3: mod_base = OTHER; note = guanosine-3'-phosphate
  modified_base 4: mod_base = OTHER; note = uridine-3'-phosphate
  modified_base 5: mod_base = OTHER; note = uridine-3'-phosphate
  modified_base 6: mod_base = OTHER; note = cytidine-3'-phosphate
  modified_base 7: mod_base = OTHER; note = uridine-3'-phosphate
  modified_base 8: mod_base = OTHER; note = adenosine-3'-phosphate
  modified_base 9: mod_base = OTHER; note = cytidine-3'-phosphate
  modified_base 10: mod_base = OTHER; note = adenosine-3'-phosphate
  modified_base 11: mod_base = OTHER; note = uridine-3'-phosphate
  modified_base 12: mod_base = OTHER; note = cytidine-3'-phosphate
  modified_base 13: mod_base = OTHER; note = cytidine-3'-phosphate
  modified_base 14: mod_base = OTHER; note = cytidine-3'-phosphate
  modified_base 15: mod_base = OTHER; note = guanosine-3'-phosphate
  modified_base 16: mod_base = OTHER; note = adenosine-3'-phosphate
  modified_base 17: mod_base = OTHER; note = guanosine-3'-phosphate
  modified_base 18: mod_base = OTHER; note = guanosine-3'-phosphate
  modified_base 19: mod_base = OTHER; note = adenosine-3'-phosphate
  misc_feature 1..19: note = RNA
  misc_feature 20..21: note = DNA
tggttctacatcccgaggatt

SEQ ID NO: 1023 - DNA, 21 bp, synthetic construct
  source 1..21: mol_type = other DNA
  modified_base 1: mod_base = OTHER; note = cytidine-3'-phosphate
  modified_base 2: mod_base = OTHER; note = cytidine-3'-phosphate
  modified_base 3: mod_base = OTHER; note = cytidine-3'-phosphate
  modified_base 4: mod_base = OTHER; note = guanosine-3'-phosphate
  modified_base 5: mod_base = OTHER; note = adenosine-3'-phosphate
  modified_base 6: mod_base = OTHER; note = guanosine-3'-phosphate
  modified_base 7: mod_base = OTHER; note = guanosine-3'-phosphate
  modified_base 8: mod_base = OTHER; note = adenosine-3'-phosphate
  modified_base 9: mod_base = OTHER; note = guanosine-3'-phosphate
  modified_base 10: mod_base = OTHER; note = uridine-3'-phosphate
  modified_base 11: mod_base = OTHER; note = guanosine-3'-phosphate
  modified_base 12: mod_base = OTHER; note = uridine-3'-phosphate
  modified_base 13: mod_base = OTHER; note = cytidine-3'-phosphate
  modified_base 14: mod_base = OTHER; note = uridine-3'-phosphate
  modified_base 15: mod_base = OTHER; note = guanosine-3'-phosphate
  modified_base 16: mod_base = OTHER; note = adenosine-3'-phosphate
  modified_base 17: mod_base = OTHER; note = guanosine-3'-phosphate
  modified_base 18: mod_base = OTHER; note = guanosine-3'-phosphate
  modified_base 19: mod_base = OTHER; note = uridine-3'-phosphate
  misc_feature 1..19: note = RNA
  misc_feature 20..21: note = DNA
cccgaggagtgtctgaggttt

SEQ ID NO: 1024 - DNA, 21 bp, synthetic construct
  source 1..21: mol_type = other DNA
  modified_base 1: mod_base = OTHER; note = guanosine-3'-phosphate
  modified_base 2: mod_base = OTHER; note = uridine-3'-phosphate
  modified_base 3: mod_base = OTHER; note = cytidine-3'-phosphate
  modified_base 4: mod_base = OTHER; note = uridine-3'-phosphate
  modified_base 5: mod_base = OTHER; note = guanosine-3'-phosphate
  modified_base 6: mod_base = OTHER; note = adenosine-3'-phosphate
  modified_base 7: mod_base = OTHER; note = guanosine-3'-phosphate
  modified_base 8: mod_base = OTHER; note = guanosine-3'-phosphate
  modified_base 9: mod_base = OTHER; note = uridine-3'-phosphate
  modified_base 10: mod_base = OTHER; note = guanosine-3'-phosphate
  modified_base 11: mod_base = OTHER; note = cytidine-3'-phosphate
  modified_base 12: mod_base = OTHER; note = guanosine-3'-phosphate
  modified_base 13: mod_base = OTHER; note = cytidine-3'-phosphate
  modified_base 14: mod_base = OTHER; note = cytidine-3'-phosphate
  modified_base 15: mod_base = OTHER; note = cytidine-3'-phosphate
  modified_base 16: mod_base = OTHER; note = cytidine-3'-phosphate
  modified_base 17: mod_base = OTHER; note = adenosine-3'-phosphate
  modified_base 18: mod_base = OTHER; note = cytidine-3'-phosphate
  modified_base 19: mod_base = OTHER; note = uridine-3'-phosphate
  misc_feature 1..19: note = RNA
  misc_feature 20..21: note = DNA
gtctgaggtgcgccccacttt

SEQ ID NO: 1025 - DNA, 21 bp, synthetic construct
  source 1..21: mol_type = other DNA
  modified_base 1: mod_base = OTHER; note = guanosine-3'-phosphate
  modified_base 2: mod_base = OTHER; note = cytidine-3'-phosphate
  modified_base 3: mod_base = OTHER; note = cytidine-3'-phosphate
  modified_base 4: mod_base = OTHER; note = cytidine-3'-phosphate
  modified_base 5: mod_base = OTHER; note = cytidine-3'-phosphate
  modified_base 6: mod_base = OTHER; note = adenosine-3'-phosphate
  modified_base 7: mod_base = OTHER; note = cytidine-3'-phosphate
  modified_base 8: mod_base = OTHER; note = uridine-3'-phosphate
  modified_base 9: mod_base = OTHER; note = cytidine-3'-phosphate
  modified_base 10: mod_base = OTHER; note = uridine-3'-phosphate
  modified_base 11: mod_base = OTHER; note = guanosine-3'-phosphate
  modified_base 12: mod_base = OTHER; note = uridine-3'-phosphate
  modified_base 13: mod_base = OTHER; note = adenosine-3'-phosphate
  modified_base 14: mod_base = OTHER; note = cytidine-3'-phosphate
  modified_base 15: mod_base = OTHER; note = adenosine-3'-phosphate
  modified_base 16: mod_base = OTHER; note = guanosine-3'-phosphate
  modified_base 17: mod_base = OTHER; note = adenosine-3'-phosphate
  modified_base 18: mod_base = OTHER; note = guanosine-3'-phosphate
  modified_base 19: mod_base = OTHER; note = guanosine-3'-phosphate
  misc_feature 1..19: note = RNA
  misc_feature 20..21: note = DNA
gccccactctgtacagaggtt

SEQ ID NO: 1026 - DNA, 21 bp, synthetic construct
  source 1..21: mol_type = other DNA
  modified_base 1: mod_base = OTHER; note = cytidine-3'-phosphate
  modified_base 2: mod_base = OTHER; note = uridine-3'-phosphate
  modified_base 3: mod_base = OTHER; note = guanosine-3'-phosphate
  modified_base 4: mod_base = OTHER; note = uridine-3'-phosphate
  modified_base 5: mod_base = OTHER; note = adenosine-3'-phosphate
  modified_base 6: mod_base = OTHER; note = cytidine-3'-phosphate
  modified_base 7: mod_base = OTHER; note = adenosine-3'-phosphate
  modified_base 8: mod_base = OTHER; note = guanosine-3'-phosphate
  modified_base 9: mod_base = OTHER; note = adenosine-3'-phosphate
  modified_base 10: mod_base = OTHER; note = guanosine-3'-phosphate
  modified_base 11: mod_base = OTHER; note = guanosine-3'-phosphate
  modified_base 12: mod_base = OTHER; note = cytidine-3'-phosphate
  modified_base 13: mod_base = OTHER; note = uridine-3'-phosphate
  modified_base 14: mod_base = OTHER; note = guanosine-3'-phosphate
  modified_base 15: mod_base = OTHER; note = uridine-3'-phosphate
  modified_base 16: mod_base = OTHER; note = uridine-3'-phosphate
  modified_base 17: mod_base = OTHER; note = uridine-3'-phosphate
  modified_base 18: mod_base = OTHER; note = guanosine-3'-phosphate
  modified_base 19: mod_base = OTHER; note = guanosine-3'-phosphate
  misc_feature 1..19: note = RNA
  misc_feature 20..21: note = DNA
ctgtacagaggctgtttggtt

SEQ ID NO: 1027 - DNA, 21 bp, synthetic construct
  source 1..21: mol_type = other DNA
  modified_base 1: mod_base = OTHER; note = cytidine-3'-phosphate
  modified_base 2: mod_base = OTHER; note = uridine-3'-phosphate
  modified_base 3: mod_base = OTHER; note = guanosine-3'-phosphate
  modified_base 4: mod_base = OTHER; note = uridine-3'-phosphate
  modified_base 5: mod_base = OTHER; note = uridine-3'-phosphate
  modified_base 6: mod_base = OTHER; note = uridine-3'-phosphate
  modified_base 7: mod_base = OTHER; note = guanosine-3'-phosphate
  modified_base 8: mod_base = OTHER; note = guanosine-3'-phosphate
  modified_base 9: mod_base = OTHER; note = guanosine-3'-phosphate
  modified_base 10: mod_base = OTHER; note = cytidine-3'-phosphate
  modified_base 11: mod_base = OTHER; note = adenosine-3'-phosphate
  modified_base 12: mod_base = OTHER; note = guanosine-3'-phosphate
  modified_base 13: mod_base = OTHER; note = cytidine-3'-phosphate
  modified_base 14: mod_base = OTHER; note = cytidine-3'-phosphate
  modified_base 15: mod_base = OTHER; note = uridine-3'-phosphate
  modified_base 16: mod_base = OTHER; note = uridine-3'-phosphate
  modified_base 17: mod_base = OTHER; note = guanosine-3'-phosphate
  modified_base 18: mod_base = OTHER; note = cytidine-3'-phosphate
  modified_base 19: mod_base = OTHER; note = cytidine-3'-phosphate
  misc_feature 1..19: note = RNA
  misc_feature 20..21: note = DNA
ctgtttgggcagccttgcctt

SEQ ID NO: 1028 - DNA, 21 bp, synthetic construct
  source 1..21: mol_type = other DNA
  modified_base 1: mod_base = OTHER; note = cytidine-3'-phosphate
  modified_base 2: mod_base = OTHER; note = uridine-3'-phosphate
  modified_base 3: mod_base = OTHER; note = uridine-3'-phosphate
  modified_base 4: mod_base = OTHER; note = guanosine-3'-phosphate
  modified_base 5: mod_base = OTHER; note = cytidine-3'-phosphate
  modified_base 6: mod_base = OTHER; note = cytidine-3'-phosphate
  modified_base 7: mod_base = OTHER; note = uridine-3'-phosphate
  modified_base 8: mod_base = OTHER; note = cytidine-3'-phosphate
  modified_base 9: mod_base = OTHER; note = cytidine-3'-phosphate
  modified_base 10: mod_base = OTHER; note = adenosine-3'-phosphate
  modified_base 11: mod_base = OTHER; note = guanosine-3'-phosphate
  modified_base 12: mod_base = OTHER; note = adenosine-3'-phosphate
  modified_base 13: mod_base = OTHER; note = guanosine-3'-phosphate
  modified_base 14: mod_base = OTHER; note = adenosine-3'-phosphate
  modified_base 15: mod_base = OTHER; note = guanosine-3'-phosphate
  modified_base 16: mod_base = OTHER; note = cytidine-3'-phosphate
  modified_base 17: mod_base = OTHER; note = adenosine-3'-phosphate
  modified_base 18: mod_base = OTHER; note = guanosine-3'-phosphate
  modified_base 19: mod_base = OTHER; note = adenosine-3'-phosphate
  misc_feature 1..19: note = RNA
  misc_feature 20..21: note = DNA
cttgcctccagagagcagatt

SEQ ID NO: 1029 - DNA, 21 bp, synthetic construct
  source 1..21: mol_type = other DNA
  modified_base 1: mod_base = OTHER; note = uridine-3'-phosphate
  modified_base 2: mod_base = OTHER; note = cytidine-3'-phosphate
  modified_base 3: mod_base = OTHER; note = cytidine-3'-phosphate
  modified_base 4: mod_base = OTHER; note = adenosine-3'-phosphate
  modified_base 5: mod_base = OTHER; note = guanosine-3'-phosphate
  modified_base 6: mod_base = OTHER; note = adenosine-3'-phosphate
  modified_base 7: mod_base = OTHER; note = guanosine-3'-phosphate
  modified_base 8: mod_base = OTHER; note = adenosine-3'-phosphate
  modified_base 9: mod_base = OTHER; note = guanosine-3'-phosphate
  modified_base 10: mod_base = OTHER; note = cytidine-3'-phosphate
  modified_base 11: mod_base = OTHER; note = adenosine-3'-phosphate
  modified_base 12: mod_base = OTHER; note = guanosine-3'-phosphate
  modified_base 13: mod_base = OTHER; note = adenosine-3'-phosphate
  modified_base 14: mod_base = OTHER; note = uridine-3'-phosphate
  modified_base 15: mod_base = OTHER; note = uridine-3'-phosphate
  modified_base 16: mod_base = OTHER; note = cytidine-3'-phosphate
  modified_base 17: mod_base = OTHER; note = cytidine-3'-phosphate
  modified_base 18: mod_base = OTHER; note = adenosine-3'-phosphate
  modified_base 19: mod_base = OTHER; note = guanosine-3'-phosphate
  misc_feature 1..19: note = RNA
  misc_feature 20..21: note = DNA
tccagagagcagattccagtt

SEQ ID NO: 1030 - DNA, 21 bp, synthetic construct
  source 1..21: mol_type = other DNA
  modified_base 1: mod_base = OTHER; note = guanosine-3'-phosphate
  modified_base 2: mod_base = OTHER; note = adenosine-3'-phosphate
  modified_base 3: mod_base = OTHER; note = uridine-3'-phosphate
  modified_base 4: mod_base = OTHER; note = uridine-3'-phosphate
  modified_base 5: mod_base = OTHER; note = cytidine-3'-phosphate
  modified_base 6: mod_base = OTHER; note = cytidine-3'-phosphate
  modified_base 7: mod_base = OTHER; note = adenosine-3'-phosphate
  modified_base 8: mod_base = OTHER; note = guanosine-3'-phosphate
  modified_base 9: mod_base = OTHER; note = cytidine-3'-phosphate
  modified_base 10: mod_base = OTHER; note = uridine-3'-phosphate
  modified_base 11: mod_base = OTHER; note = uridine-3'-phosphate
  modified_base 12: mod_base = OTHER; note = cytidine-3'-phosphate
  modified_base 13: mod_base = OTHER; note = guanosine-3'-phosphate
  modified_base 14: mod_base = OTHER; note = guanosine-3'-phosphate
  modified_base 15: mod_base = OTHER; note = adenosine-3'-phosphate
  modified_base 16: mod_base = OTHER; note = adenosine-3'-phosphate
  modified_base 17: mod_base = OTHER; note = guanosine-3'-phosphate
  modified_base 18: mod_base = OTHER; note = cytidine-3'-phosphate
  modified_base 19: mod_base = OTHER; note = cytidine-3'-phosphate
  misc_feature 1..19: note = RNA
  misc_feature 20..21: note = DNA
gattccagcttcggaagcctt

SEQ ID NO: 1031 - DNA, 21 bp, synthetic construct
  source 1..21: mol_type = other DNA
  modified_base 1: mod_base = OTHER; note = guanosine-3'-phosphate
  modified_base 2: mod_base = OTHER; note = adenosine-3'-phosphate
  modified_base 3: mod_base = OTHER; note = adenosine-3'-phosphate
  modified_base 4: mod_base = OTHER; note = uridine-3'-phosphate
  modified_base 5: mod_base = OTHER; note = guanosine-3'-phosphate
  modified_base 6: mod_base = OTHER; note = guanosine-3'-phosphate
  modified_base 7: mod_base = OTHER; note = adenosine-3'-phosphate
  modified_base 8: mod_base = OTHER; note = adenosine-3'-phosphate
  modified_base 9: mod_base = OTHER; note = guanosine-3'-phosphate
  modified_base 10: mod_base = OTHER; note = guanosine-3'-phosphate
  modified_base 11: mod_base = OTHER; note = uridine-3'-phosphate
  modified_base 12: mod_base = OTHER; note = guanosine-3'-phosphate
  modified_base 13: mod_base = OTHER; note = cytidine-3'-phosphate
  modified_base 14: mod_base = OTHER; note = uridine-3'-phosphate
  modified_base 15: mod_base = OTHER; note = cytidine-3'-phosphate
  modified_base 16: mod_base = OTHER; note = cytidine-3'-phosphate
  modified_base 17: mod_base = OTHER; note = cytidine-3'-phosphate
  modified_base 18: mod_base = OTHER; note = adenosine-3'-phosphate
  modified_base 19: mod_base = OTHER; note = uridine-3'-phosphate
  misc_feature 1..19: note = RNA
  misc_feature 20..21: note = DNA
gaatggaaggtgctcccattt

SEQ ID NO: 1032 - DNA, 21 bp, synthetic construct
  source 1..21: mol_type = other DNA
  modified_base 1: mod_base = OTHER; note = guanosine-3'-phosphate
  modified_base 2: mod_base = OTHER; note = uridine-3'-phosphate
  modified_base 3: mod_base = OTHER; note = guanosine-3'-phosphate
  modified_base 4: mod_base = OTHER; note = cytidine-3'-phosphate
  modified_base 5: mod_base = OTHER; note = uridine-3'-phosphate
  modified_base 6: mod_base = OTHER; note = cytidine-3'-phosphate
  modified_base 7: mod_base = OTHER; note = cytidine-3'-phosphate
  modified_base 8: mod_base = OTHER; note = cytidine-3'-phosphate
  modified_base 9: mod_base = OTHER; note = adenosine-3'-phosphate
  modified_base 10: mod_base = OTHER; note = uridine-3'-phosphate
  modified_base 11: mod_base = OTHER; note = cytidine-3'-phosphate
  modified_base 12: mod_base = OTHER; note = guanosine-3'-phosphate
  modified_base 13: mod_base = OTHER; note = guanosine-3'-phosphate
  modified_base 14: mod_base = OTHER; note = adenosine-3'-phosphate
  modified_base 15: mod_base = OTHER; note = guanosine-3'-phosphate
  modified_base 16: mod_base = OTHER; note = guanosine-3'-phosphate
  modified_base 17: mod_base = OTHER; note = guanosine-3'-phosphate
  modified_base 18: mod_base = OTHER; note = guanosine-3'-phosphate
  modified_base 19: mod_base = OTHER; note = adenosine-3'-phosphate
  misc_feature 1..19: note = RNA
  misc_feature 20..21: note = DNA
gtgctcccatcggaggggatt

SEQ ID NO: 1033 - DNA, 21 bp, synthetic construct
  source 1..21: mol_type = other DNA
  modified_base 1: mod_base = OTHER; note = uridine-3'-phosphate
  modified_base 2: mod_base = OTHER; note = cytidine-3'-phosphate
  modified_base 3: mod_base = OTHER; note = guanosine-3'-phosphate
  modified_base 4: mod_base = OTHER; note = guanosine-3'-phosphate
  modified_base 5: mod_base = OTHER; note = adenosine-3'-phosphate
  modified_base 6: mod_base = OTHER; note = guanosine-3'-phosphate
  modified_base 7: mod_base = OTHER; note = guanosine-3'-phosphate
  modified_base 8: mod_base = OTHER; note = guanosine-3'-phosphate
  modified_base 9: mod_base = OTHER; note = guanosine-3'-phosphate
  modified_base 10: mod_base = OTHER; note = adenosine-3'-phosphate
  modified_base 11: mod_base = OTHER; note = cytidine-3'-phosphate
  modified_base 12: mod_base = OTHER; note = cytidine-3'-phosphate
  modified_base 13: mod_base = OTHER; note = cytidine-3'-phosphate
  modified_base 14: mod_base = OTHER; note = uridine-3'-phosphate
  modified_base 15: mod_base = OTHER; note = cytidine-3'-phosphate
  modified_base 16: mod_base = OTHER; note = adenosine-3'-phosphate
  modified_base 17: mod_base = OTHER; note = guanosine-3'-phosphate
  modified_base 18: mod_base = OTHER; note = adenosine-3'-phosphate
  modified_base 19: mod_base = OTHER; note = guanosine-3'-phosphate
  misc_feature 1..19: note = RNA
  misc_feature 20..21: note = DNA
tcggaggggaccctcagagtt

SEQ ID NO: 1034 - DNA, 21 bp, synthetic construct
  source 1..21: mol_type = other DNA
  modified_base 1: mod_base = OTHER; note = cytidine-3'-phosphate
  modified_base 2: mod_base = OTHER; note = cytidine-3'-phosphate
  modified_base 3: mod_base = OTHER; note = cytidine-3'-phosphate
  modified_base 4: mod_base = OTHER; note = uridine-3'-phosphate
  modified_base 5: mod_base = OTHER; note = cytidine-3'-phosphate
  modified_base 6: mod_base = OTHER; note = adenosine-3'-phosphate
  modified_base 7: mod_base = OTHER; note = guanosine-3'-phosphate
  modified_base 8: mod_base = OTHER; note = adenosine-3'-phosphate
  modified_base 9: mod_base = OTHER; note = guanosine-3'-phosphate
  modified_base 10: mod_base = OTHER; note = cytidine-3'-phosphate
  modified_base 11: mod_base = OTHER; note = cytidine-3'-phosphate
  modified_base 12: mod_base = OTHER; note = cytidine-3'-phosphate
  modified_base 13: mod_base = OTHER; note = uridine-3'-phosphate
  modified_base 14: mod_base = OTHER; note = guanosine-3'-phosphate
  modified_base 15: mod_base = OTHER; note = guanosine-3'-phosphate
  modified_base 16: mod_base = OTHER; note = adenosine-3'-phosphate
  modified_base 17: mod_base = OTHER; note = guanosine-3'-phosphate
  modified_base 18: mod_base = OTHER; note = adenosine-3'-phosphate
  modified_base 19: mod_base = OTHER; note = cytidine-3'-phosphate
  misc_feature 1..19: note = RNA
  misc_feature 20..21: note = DNA
ccctcagagccctggagactt

SEQ ID NO: 1035 - DNA, 21 bp, synthetic construct
  source 1..21: mol_type = other DNA
  modified_base 1: mod_base = OTHER; note = guanosine-3'-phosphate
  modified_base 2: mod_base = OTHER; note = adenosine-3'-phosphate
  modified_base 3: mod_base = OTHER; note = guanosine-3'-phosphate
  modified_base 4: mod_base = OTHER; note = adenosine-3'-phosphate
  modified_base 5: mod_base = OTHER; note = cytidine-3'-phosphate
  modified_base 6: mod_base = OTHER; note = uridine-3'-phosphate
  modified_base 7: mod_base = OTHER; note = guanosine-3'-phosphate
  modified_base 8: mod_base = OTHER; note = cytidine-3'-phosphate
  modified_base 9: mod_base = OTHER; note = cytidine-3'-phosphate
  modified_base 10: mod_base = OTHER; note = adenosine-3'-phosphate
  modified_base 11: mod_base = OTHER; note = guanosine-3'-phosphate
  modified_base 12: mod_base = OTHER; note = guanosine-3'-phosphate
  modified_base 13: mod_base = OTHER; note = uridine-3'-phosphate
  modified_base 14: mod_base = OTHER; note = guanosine-3'-phosphate
  modified_base 15: mod_base = OTHER; note = guanosine-3'-phosphate
  modified_base 16: mod_base = OTHER; note = guanosine-3'-phosphate
  modified_base 17: mod_base = OTHER; note = cytidine-3'-phosphate
  modified_base 18: mod_base = OTHER; note = cytidine-3'-phosphate
  modified_base 19: mod_base = OTHER; note = uridine-3'-phosphate
  misc_feature 1..19: note = RNA
  misc_feature 20..21: note = DNA
gagactgccaggtgggccttt

SEQ ID NO: 1036 - DNA, 21 bp, synthetic construct
  source 1..21: mol_type = other DNA
  modified_base 1: mod_base = OTHER; note = adenosine-3'-phosphate
  modified_base 2: mod_base = OTHER; note = guanosine-3'-phosphate
  modified_base 3: mod_base = OTHER; note = guanosine-3'-phosphate
  modified_base 4: mod_base = OTHER; note = uridine-3'-phosphate
  modified_base 5: mod_base = OTHER; note = guanosine-3'-phosphate
  modified_base 6: mod_base = OTHER; note = guanosine-3'-phosphate
  modified_base 7: mod_base = OTHER; note = guanosine-3'-phosphate
  modified_base 8: mod_base = OTHER; note = cytidine-3'-phosphate
  modified_base 9: mod_base = OTHER; note = cytidine-3'-phosphate
  modified_base 10: mod_base = OTHER; note = uridine-3'-phosphate
  modified_base 11: mod_base = OTHER; note = guanosine-3'-phosphate
  modified_base 12: mod_base = OTHER; note = cytidine-3'-phosphate
  modified_base 13: mod_base = OTHER; note = uridine-3'-phosphate
  modified_base 14: mod_base = OTHER; note = guanosine-3'-phosphate
  modified_base 15: mod_base = OTHER; note = cytidine-3'-phosphate
  modified_base 16: mod_base = OTHER; note = cytidine-3'-phosphate
  modified_base 17: mod_base = OTHER; note = adenosine-3'-phosphate
  modified_base 18: mod_base = OTHER; note = cytidine-3'-phosphate
  modified_base 19: mod_base = OTHER; note = uridine-3'-phosphate
  misc_feature 1..19: note = RNA
  misc_feature 20..21: note = DNA
aggtgggcctgctgccacttt

SEQ ID NO: 1037 - DNA, 21 bp, synthetic construct
  source 1..21: mol_type = other DNA
  modified_base 1: mod_base = OTHER; note = cytidine-3'-phosphate
  modified_base 2: mod_base = OTHER; note = uridine-3'-phosphate
  modified_base 3: mod_base = OTHER; note = guanosine-3'-phosphate
  modified_base 4: mod_base = OTHER; note = cytidine-3'-phosphate
  modified_base 5: mod_base = OTHER; note = cytidine-3'-phosphate
  modified_base 6: mod_base = OTHER; note = adenosine-3'-phosphate
  modified_base 7: mod_base = OTHER; note = cytidine-3'-phosphate
  modified_base 8: mod_base = OTHER; note = uridine-3'-phosphate
  modified_base 9: mod_base = OTHER; note = guanosine-3'-phosphate
  modified_base 10: mod_base = OTHER; note = uridine-3'-phosphate
  modified_base 11: mod_base = OTHER; note = adenosine-3'-phosphate
  modified_base 12: mod_base = OTHER; note = adenosine-3'-phosphate
  modified_base 13: mod_base = OTHER; note = guanosine-3'-phosphate
  modified_base 14: mod_base = OTHER; note = cytidine-3'-phosphate
  modified_base 15: mod_base = OTHER; note = cytidine-3'-phosphate
  modified_base 16: mod_base = OTHER; note = adenosine-3'-phosphate
  modified_base 17: mod_base = OTHER; note = adenosine-3'-phosphate
  modified_base 18: mod_base = OTHER; note = adenosine-3'-phosphate
  modified_base 19: mod_base = OTHER; note = adenosine-3'-phosphate
  misc_feature 1..19: note = RNA
  misc_feature 20..21: note = DNA
ctgccactgtaagccaaaatt

SEQ ID NO: 1038 - DNA, 21 bp, synthetic construct
  source 1..21: mol_type = other DNA
  modified_base 1: mod_base = OTHER; note = cytidine-3'-phosphate
  modified_base 2: mod_base = OTHER; note = uridine-3'-phosphate
  modified_base 3: mod_base = OTHER; note = guanosine-3'-phosphate
  modified_base 4: mod_base = OTHER; note = uridine-3'-phosphate
  modified_base 5: mod_base = OTHER; note = adenosine-3'-phosphate
  modified_base 6: mod_base = OTHER; note = adenosine-3'-phosphate
  modified_base 7: mod_base = OTHER; note = guanosine-3'-phosphate
  modified_base 8: mod_base = OTHER; note = cytidine-3'-phosphate
  modified_base 9: mod_base = OTHER; note = cytidine-3'-phosphate
  modified_base 10: mod_base = OTHER; note = adenosine-3'-phosphate
  modified_base 11: mod_base = OTHER; note = adenosine-3'-phosphate
  modified_base 12: mod_base = OTHER; note = adenosine-3'-phosphate
  modified_base 13: mod_base = OTHER; note = adenosine-3'-phosphate
  modified_base 14: mod_base = OTHER; note = guanosine-3'-phosphate
  modified_base 15: mod_base = OTHER; note = guanosine-3'-phosphate
  modified_base 16: mod_base = OTHER; note = uridine-3'-phosphate
  modified_base 17: mod_base = OTHER; note = guanosine-3'-phosphate
  modified_base 18: mod_base = OTHER; note = guanosine-3'-phosphate
  modified_base 19: mod_base = OTHER; note = guanosine-3'-phosphate
  misc_feature 1..19: note = RNA
  misc_feature 20..21: note = DNA
ctgtaagccaaaaggtgggtt

SEQ ID NO: 1039 - DNA, 21 bp, synthetic construct
  source 1..21: mol_type = other DNA
  modified_base 1: mod_base = OTHER; note = guanosine-3'-phosphate
  modified_base 2: mod_base = OTHER; note = uridine-3'-phosphate
  modified_base 3: mod_base = OTHER; note = guanosine-3'-phosphate
  modified_base 4: mod_base = OTHER; note = guanosine-3'-phosphate
  modified_base 5: mod_base = OTHER; note = guanosine-3'-phosphate
  modified_base 6: mod_base = OTHER; note = guanosine-3'-phosphate
  modified_base 7: mod_base = OTHER; note = adenosine-3'-phosphate
  modified_base 8: mod_base = OTHER; note = adenosine-3'-phosphate
  modified_base 9: mod_base = OTHER; note = guanosine-3'-phosphate
  modified_base 10: mod_base = OTHER; note = uridine-3'-phosphate
  modified_base 11: mod_base = OTHER; note = cytidine-3'-phosphate
  modified_base 12: mod_base = OTHER; note = cytidine-3'-phosphate
  modified_base 13: mod_base = OTHER; note = uridine-3'-phosphate
  modified_base 14: mod_base = OTHER; note = guanosine-3'-phosphate
  modified_base 15: mod_base = OTHER; note = adenosine-3'-phosphate
  modified_base 16: mod_base = OTHER; note = cytidine-3'-phosphate
  modified_base 17: mod_base = OTHER; note = uridine-3'-phosphate
  modified_base 18: mod_base = OTHER; note = cytidine-3'-phosphate
  modified_base 19: mod_base = OTHER; note = cytidine-3'-phosphate
  misc_feature 1..19: note = RNA
  misc_feature 20..21: note = DNA
gtggggaagtcctgactcctt

SEQ ID NO: 1040 - DNA, 21 bp, synthetic construct
  source 1..21: mol_type = other DNA
  modified_base 1: mod_base = OTHER; note = cytidine-3'-phosphate
  modified_base 2: mod_base = OTHER; note = cytidine-3'-phosphate
  modified_base 3: mod_base = OTHER; note = uridine-3'-phosphate
  modified_base 4: mod_base = OTHER; note = guanosine-3'-phosphate
  modified_base 5: mod_base = OTHER; note = adenosine-3'-phosphate
  modified_base 6: mod_base = OTHER; note = cytidine-3'-phosphate
  modified_base 7: mod_base = OTHER; note = uridine-3'-phosphate
  modified_base 8: mod_base = OTHER; note = cytidine-3'-phosphate
  modified_base 9: mod_base = OTHER; note = cytidine-3'-phosphate
  modified_base 10: mod_base = OTHER; note = adenosine-3'-phosphate
  modified_base 11: mod_base = OTHER; note = guanosine-3'-phosphate
  modified_base 12: mod_base = OTHER; note = guanosine-3'-phosphate
  modified_base 13: mod_base = OTHER; note = guanosine-3'-phosphate
  modified_base 14: mod_base = OTHER; note = uridine-3'-phosphate
  modified_base 15: mod_base = OTHER; note = cytidine-3'-phosphate
  modified_base 16: mod_base = OTHER; note = cytidine-3'-phosphate
  modified_base 17: mod_base = OTHER; note = uridine-3'-phosphate
  modified_base 18: mod_base = OTHER; note = uridine-3'-phosphate
  modified_base 19: mod_base = OTHER; note = guanosine-3'-phosphate
  misc_feature 1..19: note = RNA
  misc_feature 20..21: note = DNA
cctgactccagggtccttgtt

SEQ ID NO: 1041 - DNA, 21 bp, synthetic construct
  source 1..21: mol_type = other DNA
  modified_base 1: mod_base = OTHER; note = guanosine-3'-phosphate
  modified_base 2: mod_base = OTHER; note = guanosine-3'-phosphate
  modified_base 3: mod_base = OTHER; note = guanosine-3'-phosphate
  modified_base 4: mod_base = OTHER; note = uridine-3'-phosphate
  modified_base 5: mod_base = OTHER; note = cytidine-3'-phosphate
  modified_base 6: mod_base = OTHER; note = cytidine-3'-phosphate
  modified_base 7: mod_base = OTHER; note = uridine-3'-phosphate
  modified_base 8: mod_base = OTHER; note = uridine-3'-phosphate
  modified_base 9: mod_base = OTHER; note = guanosine-3'-phosphate
  modified_base 10: mod_base = OTHER; note = cytidine-3'-phosphate
  modified_base 11: mod_base = OTHER; note = cytidine-3'-phosphate
  modified_base 12: mod_base = OTHER; note = cytidine-3'-phosphate
  modified_base 13: mod_base = OTHER; note = cytidine-3'-phosphate
  modified_base 14: mod_base = OTHER; note = adenosine-3'-phosphate
  modified_base 15: mod_base = OTHER; note = cytidine-3'-phosphate
  modified_base 16: mod_base = OTHER; note = cytidine-3'-phosphate
  modified_base 17: mod_base = OTHER; note = cytidine-3'-phosphate
  modified_base 18: mod_base = OTHER; note = cytidine-3'-phosphate
  modified_base 19: mod_base = OTHER; note = uridine-3'-phosphate
  misc_feature 1..19: note = RNA
  misc_feature 20..21: note = DNA
gggtccttgccccaccccttt

SEQ ID NO: 1042 - DNA, 21 bp, synthetic construct
  source 1..21: mol_type = other DNA
  modified_base 1: mod_base = OTHER; note = guanosine-3'-phosphate
  modified_base 2: mod_base = OTHER; note = cytidine-3'-phosphate
  modified_base 3: mod_base = OTHER; note = cytidine-3'-phosphate
  modified_base 4: mod_base = OTHER; note = cytidine-3'-phosphate
  modified_base 5: mod_base = OTHER; note = cytidine-3'-phosphate
  modified_base 6: mod_base = OTHER; note = adenosine-3'-phosphate
  modified_base 7: mod_base = OTHER; note = cytidine-3'-phosphate
  modified_base 8: mod_base = OTHER; note = cytidine-3'-phosphate
  modified_base 9: mod_base = OTHER; note = cytidine-3'-phosphate
  modified_base 10: mod_base = OTHER; note = cytidine-3'-phosphate
  modified_base 11: mod_base = OTHER; note = uridine-3'-phosphate
  modified_base 12: mod_base = OTHER; note = guanosine-3'-phosphate
  modified_base 13: mod_base = OTHER; note = cytidine-3'-phosphate
  modified_base 14: mod_base = OTHER; note = cytidine-3'-phosphate
  modified_base 15: mod_base = OTHER; note = uridine-3'-phosphate
  modified_base 16: mod_base = OTHER; note = guanosine-3'-phosphate
  modified_base 17: mod_base = OTHER; note = cytidine-3'-phosphate
  modified_base 18: mod_base = OTHER; note = cytidine-3'-phosphate
  modified_base 19: mod_base = OTHER; note = adenosine-3'-phosphate
  misc_feature 1..19: note = RNA
  misc_feature 20..21: note = DNA
gccccacccctgcctgccatt

SEQ ID NO: 1043 - DNA, 21 bp, synthetic construct
  source 1..21: mol_type = other DNA
  modified_base 1: mod_base = OTHER; note = cytidine-3'-phosphate
  modified_base 2: mod_base = OTHER; note = cytidine-3'-phosphate
  modified_base 3: mod_base = OTHER; note = uridine-3'-phosphate
  modified_base 4: mod_base = OTHER; note = guanosine-3'-phosphate
  modified_base 5: mod_base = OTHER; note = cytidine-3'-phosphate
  modified_base 6: mod_base = OTHER; note = cytidine-3'-phosphate
  modified_base 7: mod_base = OTHER; note = adenosine-3'-phosphate
  modified_base 8: mod_base = OTHER; note = cytidine-3'-phosphate
  modified_base 9: mod_base = OTHER; note = cytidine-3'-phosphate
  modified_base 10: mod_base = OTHER; note = uridine-3'-phosphate
  modified_base 11: mod_base = OTHER; note = guanosine-3'-phosphate
  modified_base 12: mod_base = OTHER; note = guanosine-3'-phosphate
  modified_base 13: mod_base = OTHER; note = guanosine-3'-phosphate
  modified_base 14: mod_base = OTHER; note = cytidine-3'-phosphate
  modified_base 15: mod_base = OTHER; note = cytidine-3'-phosphate
  modified_base 16: mod_base = OTHER; note = cytidine-3'-phosphate
  modified_base 17: mod_base = OTHER; note = uridine-3'-phosphate
  modified_base 18: mod_base = OTHER; note = cytidine-3'-phosphate
  modified_base 19: mod_base = OTHER; note = adenosine-3'-phosphate
  misc_feature 1..19: note = RNA
  misc_feature 20..21: note = DNA
cctgccacctgggccctcatt

SEQ ID NO: 1044 - DNA, 21 bp, synthetic construct
  source 1..21: mol_type = other DNA
  modified_base 1: mod_base = OTHER; note = cytidine-3'-phosphate
  modified_base 2: mod_base = OTHER; note = uridine-3'-phosphate
  modified_base 3: mod_base = OTHER; note = guanosine-3'-phosphate
  modified_base 4: mod_base = OTHER; note = guanosine-3'-phosphate
  modified_base 5: mod_base = OTHER; note = guanosine-3'-phosphate
  modified_base 6: mod_base = OTHER; note = cytidine-3'-phosphate
  modified_base 7: mod_base = OTHER; note = cytidine-3'-phosphate
  modified_base 8: mod_base = OTHER; note = cytidine-3'-phosphate
  modified_base 9: mod_base = OTHER; note = uridine-3'-phosphate
  modified_base 10: mod_base = OTHER; note = cytidine-3'-phosphate
  modified_base 11: mod_base = OTHER; note = adenosine-3'-phosphate
  modified_base 12: mod_base = OTHER; note = cytidine-3'-phosphate
  modified_base 13: mod_base = OTHER; note = adenosine-3'-phosphate
  modified_base 14: mod_base = OTHER; note = guanosine-3'-phosphate
  modified_base 15: mod_base = OTHER; note = cytidine-3'-phosphate
  modified_base 16: mod_base = OTHER; note = cytidine-3'-phosphate
  modified_base 17: mod_base = OTHER; note = cytidine-3'-phosphate
  modified_base 18: mod_base = OTHER; note = adenosine-3'-phosphate
  modified_base 19: mod_base = OTHER; note = guanosine-3'-phosphate
  misc_feature 1..19: note = RNA
  misc_feature 20..21: note = DNA
ctgggccctcacagcccagtt

SEQ ID NO: 1045 - DNA, 21 bp, synthetic construct
  source 1..21: mol_type = other DNA
  modified_base 1: mod_base = OTHER; note = uridine-3'-phosphate
  modified_base 2: mod_base = OTHER; note = cytidine-3'-phosphate
  modified_base 3: mod_base = OTHER; note = adenosine-3'-phosphate
  modified_base 4: mod_base = OTHER; note = cytidine-3'-phosphate
  modified_base 5: mod_base = OTHER; note = adenosine-3'-phosphate
  modified_base 6: mod_base = OTHER; note = guanosine-3'-phosphate
  modified_base 7: mod_base = OTHER; note = cytidine-3'-phosphate
  modified_base 8: mod_base = OTHER; note = cytidine-3'-phosphate
  modified_base 9: mod_base = OTHER; note = cytidine-3'-phosphate
  modified_base 10: mod_base = OTHER; note = adenosine-3'-phosphate
  modified_base 11: mod_base = OTHER; note = guanosine-3'-phosphate
  modified_base 12: mod_base = OTHER; note = adenosine-3'-phosphate
  modified_base 13: mod_base = OTHER; note = cytidine-3'-phosphate
  modified_base 14: mod_base = OTHER; note = cytidine-3'-phosphate
  modified_base 15: mod_base = OTHER; note = cytidine-3'-phosphate
  modified_base 16: mod_base = OTHER; note = uridine-3'-phosphate
  modified_base 17: mod_base = OTHER; note = cytidine-3'-phosphate
  modified_base 18: mod_base = OTHER; note = adenosine-3'-phosphate
  modified_base 19: mod_base = OTHER; note = cytidine-3'-phosphate
  misc_feature 1..19: note = RNA
  misc_feature 20..21: note = DNA
tcacagcccagaccctcactt

SEQ ID NO: 1046 - DNA, 21 bp, synthetic construct
  source 1..21: mol_type = other DNA
  modified_base 1: mod_base = OTHER; note = cytidine-3'-phosphate
  modified_base 2: mod_base = OTHER; note = uridine-3'-phosphate
  modified_base 3: mod_base = OTHER; note = cytidine-3'-phosphate
  modified_base 4: mod_base = OTHER; note = adenosine-3'-phosphate
  modified_base 5: mod_base = OTHER; note = cytidine-3'-phosphate
  modified_base 6: mod_base = OTHER; note = uridine-3'-phosphate
  modified_base 7: mod_base = OTHER; note = guanosine-3'-phosphate
  modified_base 8: mod_base = OTHER; note = guanosine-3'-phosphate
  modified_base 9: mod_base = OTHER; note = guanosine-3'-phosphate
  modified_base 10: mod_base = OTHER; note = adenosine-3'-phosphate
  modified_base 11: mod_base = OTHER; note = guanosine-3'-phosphate
  modified_base 12: mod_base = OTHER; note = guanosine-3'-phosphate
  modified_base 13: mod_base = OTHER; note = uridine-3'-phosphate
  modified_base 14: mod_base = OTHER; note = guanosine-3'-phosphate
  modified_base 15: mod_base = OTHER; note = adenosine-3'-phosphate
  modified_base 16: mod_base = OTHER; note = guanosine-3'-phosphate
  modified_base 17: mod_base = OTHER; note = cytidine-3'-phosphate
  modified_base 18: mod_base = OTHER; note = uridine-3'-phosphate
  modified_base 19: mod_base = OTHER; note = cytidine-3'-phosphate
  misc_feature 1..19: note = RNA
  misc_feature 20..21: note = DNA
ctcactgggaggtgagctctt

SEQ ID NO: 1047 - DNA, 21 bp, synthetic construct
  source 1..21: mol_type = other DNA
  modified_base 1: mod_base = OTHER; note = guanosine-3'-phosphate
  modified_base 2: mod_base = OTHER; note = guanosine-3'-phosphate
  modified_base 3: mod_base = OTHER; note = uridine-3'-phosphate
  modified_base 4: mod_base = OTHER; note = guanosine-3'-phosphate
  modified_base 5: mod_base = OTHER; note = adenosine-3'-phosphate
  modified_base 6: mod_base = OTHER; note = guanosine-3'-phosphate
  modified_base 7: mod_base = OTHER; note = cytidine-3'-phosphate
  modified_base 8: mod_base = OTHER; note = uridine-3'-phosphate
  modified_base 9: mod_base = OTHER; note = cytidine-3'-phosphate
  modified_base 10: mod_base = OTHER; note = adenosine-3'-phosphate
  modified_base 11: mod_base = OTHER; note = guanosine-3'-phosphate
  modified_base 12: mod_base = OTHER; note = cytidine-3'-phosphate
  modified_base 13: mod_base = OTHER; note = uridine-3'-phosphate
  modified_base 14: mod_base = OTHER; note = guanosine-3'-phosphate
  modified_base 15: mod_base = OTHER; note = cytidine-3'-phosphate
  modified_base 16: mod_base = OTHER; note = cytidine-3'-phosphate
  modified_base 17: mod_base = OTHER; note = cytidine-3'-phosphate
  modified_base 18: mod_base = OTHER; note = uridine-3'-phosphate
  modified_base 19: mod_base = OTHER; note = uridine-3'-phosphate
  misc_feature 1..19: note = RNA
  misc_feature 20..21: note = DNA
ggtgagctcagctgccctttt

SEQ ID NO: 1048 - DNA, 21 bp, synthetic construct
  source 1..21: mol_type = other DNA
  modified_base 1: mod_base = OTHER; note = uridine-3'-phosphate
  modified_base 2: mod_base = OTHER; note = guanosine-3'-phosphate
  modified_base 3: mod_base = OTHER; note = guanosine-3'-phosphate
  modified_base 4: mod_base = OTHER; note = adenosine-3'-phosphate
  modified_base 5: mod_base = OTHER; note = adenosine-3'-phosphate
  modified_base 6: mod_base = OTHER; note = uridine-3'-phosphate
  modified_base 7: mod_base = OTHER; note = adenosine-3'-phosphate
  modified_base 8: mod_base = OTHER; note = adenosine-3'-phosphate
  modified_base 9: mod_base = OTHER; note = adenosine-3'-phosphate
  modified_base 10: mod_base = OTHER; note = guanosine-3'-phosphate
  modified_base 11: mod_base = OTHER; note = cytidine-3'-phosphate
  modified_base 12: mod_base = OTHER; note = uridine-3'-phosphate
  modified_base 13: mod_base = OTHER; note = guanosine-3'-phosphate
  modified_base 14: mod_base = OTHER; note = cytidine-3'-phosphate
  modified_base 15: mod_base = OTHER; note = cytidine-3'-phosphate
  modified_base 16: mod_base = OTHER; note = uridine-3'-phosphate
  modified_base 17: mod_base = OTHER; note = guanosine-3'-phosphate
  modified_base 18: mod_base = OTHER; note = adenosine-3'-phosphate
  modified_base 19: mod_base = OTHER; note = uridine-3'-phosphate
  misc_feature 1..19: note = RNA
  misc_feature 20..21: note = DNA
tggaataaagctgcctgattt

SEQ ID NO: 1049 - DNA, 21 bp, synthetic construct
  source 1..21: mol_type = other DNA
  modified_base 1: mod_base = OTHER; note = cytidine-3'-phosphate
  modified_base 2: mod_base = OTHER; note = uridine-3'-phosphate
  modified_base 3: mod_base = OTHER; note = guanosine-3'-phosphate
  modified_base 4: mod_base = OTHER; note = guanosine-3'-phosphate
  modified_base 5: mod_base = OTHER; note = adenosine-3'-phosphate
  modified_base 6: mod_base = OTHER; note = cytidine-3'-phosphate
  modified_base 7: mod_base = OTHER; note = uridine-3'-phosphate
  modified_base 8: mod_base = OTHER; note = guanosine-3'-phosphate
  modified_base 9: mod_base = OTHER; note = guanosine-3'-phosphate
  modified_base 10: mod_base = OTHER; note = guanosine-3'-phosphate
  modified_base 11: mod_base = OTHER; note = uridine-3'-phosphate
  modified_base 12: mod_base = OTHER; note = cytidine-3'-phosphate
  modified_base 13: mod_base = OTHER; note = uridine-3'-phosphate
  modified_base 14: mod_base = OTHER; note = guanosine-3'-phosphate
  modified_base 15: mod_base = OTHER; note = guanosine-3'-phosphate
  modified_base 16: mod_base = OTHER; note = cytidine-3'-phosphate
  modified_base 17: mod_base = OTHER; note = uridine-3'-phosphate
  modified_base 18: mod_base = OTHER; note = cytidine-3'-phosphate
  modified_base 19: mod_base = OTHER; note = adenosine-3'-phosphate
  misc_feature 1..19: note = RNA
  misc_feature 20..21: note = DNA
ctggactgggtctggctcatt

SEQ ID NO: 1050 - DNA, 21 bp, synthetic construct
  source 1..21: mol_type = other DNA
  modified_base 1: mod_base = OTHER; note = adenosine-3'-phosphate
  modified_base 2: mod_base = OTHER; note = cytidine-3'-phosphate
  modified_base 3: mod_base = OTHER; note = cytidine-3'-phosphate
  modified_base 4: mod_base = OTHER; note = adenosine-3'-phosphate
  modified_base 5: mod_base = OTHER; note = guanosine-3'-phosphate
  modified_base 6: mod_base = OTHER; note = adenosine-3'-phosphate
  modified_base 7: mod_base = OTHER; note = guanosine-3'-phosphate
  modified_base 8: mod_base = OTHER; note = cytidine-3'-phosphate
  modified_base 9: mod_base = OTHER; note = uridine-3'-phosphate
  modified_base 10: mod_base = OTHER; note = guanosine-3'-phosphate
  modified_base 11: mod_base = OTHER; note = guanosine-3'-phosphate
  modified_base 12: mod_base = OTHER; note = adenosine-3'-phosphate
  modified_base 13: mod_base = OTHER; note = cytidine-3'-phosphate
  modified_base 14: mod_base = OTHER; note = uridine-3'-phosphate
  modified_base 15: mod_base = OTHER; note = guanosine-3'-phosphate
  modified_base 16: mod_base = OTHER; note = guanosine-3'-phosphate
  modified_base 17: mod_base = OTHER; note = guanosine-3'-phosphate
  modified_base 18: mod_base = OTHER; note = uridine-3'-phosphate
  modified_base 19: mod_base = OTHER; note = cytidine-3'-phosphate
  misc_feature 1..19: note = RNA
  misc_feature 20..21: note = DNA
accagagctggactgggtctt

SEQ ID NO: 1051 - DNA, 21 bp, synthetic construct
  source 1..21: mol_type = other DNA
  modified_base 1: mod_base = OTHER; note = cytidine-3'-phosphate
  modified_base 2: mod_base = OTHER; note = adenosine-3'-phosphate
  modified_base 3: mod_base = OTHER; note = guanosine-3'-phosphate
  modified_base 4: mod_base = OTHER; note = adenosine-3'-phosphate
  modified_base 5: mod_base = OTHER; note = guanosine-3'-phosphate
  modified_base 6: mod_base = OTHER; note = guanosine-3'-phosphate
  modified_base 7: mod_base = OTHER; note = guanosine-3'-phosphate
  modified_base 8: mod_base = OTHER; note = cytidine-3'-phosphate
  modified_base 9: mod_base = OTHER; note = adenosine-3'-phosphate
  modified_base 10: mod_base = OTHER; note = guanosine-3'-phosphate
  modified_base 11: mod_base = OTHER; note = guanosine-3'-phosphate
  modified_base 12: mod_base = OTHER; note = cytidine-3'-phosphate
  modified_base 13: mod_base = OTHER; note = adenosine-3'-phosphate
  modified_base 14: mod_base = OTHER; note = cytidine-3'-phosphate
  modified_base 15: mod_base = OTHER; note = cytidine-3'-phosphate
  modified_base 16: mod_base = OTHER; note = adenosine-3'-phosphate
  modified_base 17: mod_base = OTHER; note = guanosine-3'-phosphate
  modified_base 18: mod_base = OTHER; note = adenosine-3'-phosphate
  modified_base 19: mod_base = OTHER; note = guanosine-3'-phosphate
  misc_feature 1..19: note = RNA
  misc_feature 20..21: note = DNA
cagagggcaggcaccagagtt

SEQ ID NO: 1052 - DNA, 21 bp, synthetic construct
  source 1..21: mol_type = other DNA
  modified_base 1: mod_base = OTHER; note = uridine-3'-phosphate
  modified_base 2: mod_base = OTHER; note = cytidine-3'-phosphate
  modified_base 3: mod_base = OTHER; note = adenosine-3'-phosphate
  modified_base 4: mod_base = OTHER; note = guanosine-3'-phosphate
  modified_base 5: mod_base = OTHER; note = cytidine-3'-phosphate
  modified_base 6: mod_base = OTHER; note = uridine-3'-phosphate
  modified_base 7: mod_base = OTHER; note = cytidine-3'-phosphate
  modified_base 8: mod_base = OTHER; note = guanosine-3'-phosphate
  modified_base 9: mod_base = OTHER; note = cytidine-3'-phosphate
  modified_base 10: mod_base = OTHER; note = adenosine-3'-phosphate
  modified_base 11: mod_base = OTHER; note = cytidine-3'-phosphate
  modified_base 12: mod_base = OTHER; note = cytidine-3'-phosphate
  modified_base 13: mod_base = OTHER; note = adenosine-3'-phosphate
  modified_base 14: mod_base = OTHER; note = guanosine-3'-phosphate
  modified_base 15: mod_base = OTHER; note = adenosine-3'-phosphate
  modified_base 16: mod_base = OTHER; note = guanosine-3'-phosphate
  modified_base 17: mod_base = OTHER; note = guanosine-3'-phosphate
  modified_base 18: mod_base = OTHER; note = guanosine-3'-phosphate
  modified_base 19: mod_base = OTHER; note = cytidine-3'-phosphate
  misc_feature 1..19: note = RNA
  misc_feature 20..21: note = DNA
tcagctcgcaccagagggctt

SEQ ID NO: 1053 - DNA, 21 bp, synthetic construct
  source 1..21: mol_type = other DNA
  modified_base 1: mod_base = OTHER; note = uridine-3'-phosphate
  modified_base 2: mod_base = OTHER; note = cytidine-3'-phosphate
  modified_base 3: mod_base = OTHER; note = uridine-3'-phosphate
  modified_base 4: mod_base = OTHER; note = cytidine-3'-phosphate
  modified_base 5: mod_base = OTHER; note = adenosine-3'-phosphate
  modified_base 6: mod_base = OTHER; note = guanosine-3'-phosphate
  modified_base 7: mod_base = OTHER; note = guanosine-3'-phosphate
  modified_base 8: mod_base = OTHER; note = uridine-3'-phosphate
  modified_base 9: mod_base = OTHER; note = cytidine-3'-phosphate
  modified_base 10: mod_base = OTHER; note = adenosine-3'-phosphate
  modified_base 11: mod_base = OTHER; note = guanosine-3'-phosphate
  modified_base 12: mod_base = OTHER; note = cytidine-3'-phosphate
  modified_base 13: mod_base = OTHER; note = uridine-3'-phosphate
  modified_base 14: mod_base = OTHER; note = cytidine-3'-phosphate
  modified_base 15: mod_base = OTHER; note = guanosine-3'-phosphate
  modified_base 16: mod_base = OTHER; note = cytidine-3'-phosphate
  modified_base 17: mod_base = OTHER; note = adenosine-3'-phosphate
  modified_base 18: mod_base = OTHER; note = cytidine-3'-phosphate
  modified_base 19: mod_base = OTHER; note = cytidine-3'-phosphate
  misc_feature 1..19: note = RNA
  misc_feature 20..21: note = DNA
tctcaggtcagctcgcacctt

SEQ ID NO: 1054 - DNA, 21 bp, synthetic construct
  source 1..21: mol_type = other DNA
  modified_base 1: mod_base = OTHER; note = guanosine-3'-phosphate
  modified_base 2: mod_base = OTHER; note = guanosine-3'-phosphate
  modified_base 3: mod_base = OTHER; note = adenosine-3'-phosphate
  modified_base 4: mod_base = OTHER; note = adenosine-3'-phosphate
  modified_base 5: mod_base = OTHER; note = guanosine-3'-phosphate
  modified_base 6: mod_base = OTHER; note = uridine-3'-phosphate
  modified_base 7: mod_base = OTHER; note = guanosine-3'-phosphate
  modified_base 8: mod_base = OTHER; note = cytidine-3'-phosphate
  modified_base 9: mod_base = OTHER; note = adenosine-3'-phosphate
  modified_base 10: mod_base = OTHER; note = uridine-3'-phosphate
  modified_base 11: mod_base = OTHER; note = cytidine-3'-phosphate
  modified_base 12: mod_base = OTHER; note = uridine-3'-phosphate
  modified_base 13: mod_base = OTHER; note = cytidine-3'-phosphate
  modified_base 14: mod_base = OTHER; note = adenosine-3'-phosphate
  modified_base 15: mod_base = OTHER; note = guanosine-3'-phosphate
  modified_base 16: mod_base = OTHER; note = guanosine-3'-phosphate
  modified_base 17: mod_base = OTHER; note = uridine-3'-phosphate
  modified_base 18: mod_base = OTHER; note = cytidine-3'-phosphate
  modified_base 19: mod_base = OTHER; note = adenosine-3'-phosphate
  misc_feature 1..19: note = RNA
  misc_feature 20..21: note = DNA
ggaagtgcatctcaggtcatt

SEQ ID NO: 1055 - DNA, 21 bp, synthetic construct
  source 1..21: mol_type = other DNA
  modified_base 1: mod_base = OTHER; note = cytidine-3'-phosphate
  modified_base 2: mod_base = OTHER; note = adenosine-3'-phosphate
  modified_base 3: mod_base = OTHER; note = cytidine-3'-phosphate
  modified_base 4: mod_base = OTHER; note = adenosine-3'-phosphate
  modified_base 5: mod_base = OTHER; note = guanosine-3'-phosphate
  modified_base 6: mod_base = OTHER; note = adenosine-3'-phosphate
  modified_base 7: mod_base = OTHER; note = guanosine-3'-phosphate
  modified_base 8: mod_base = OTHER; note = guanosine-3'-phosphate
  modified_base 9: mod_base = OTHER; note = adenosine-3'-phosphate
  modified_base 10: mod_base = OTHER; note = guanosine-3'-phosphate
  modified_base 11: mod_base = OTHER; note = guanosine-3'-phosphate
  modified_base 12: mod_base = OTHER; note = guanosine-3'-phosphate
  modified_base 13: mod_base = OTHER; note = adenosine-3'-phosphate
  modified_base 14: mod_base = OTHER; note = adenosine-3'-phosphate
  modified_base 15: mod_base = OTHER; note = guanosine-3'-phosphate
  modified_base 16: mod_base = OTHER; note = uridine-3'-phosphate
  modified_base 17: mod_base = OTHER; note = guanosine-3'-phosphate
  modified_base 18: mod_base = OTHER; note = cytidine-3'-phosphate
  modified_base 19: mod_base = OTHER; note = adenosine-3'-phosphate
  misc_feature 1..19: note = RNA
  misc_feature 20..21: note = DNA
cacagaggagggaagtgcatt

SEQ ID NO: 1056 - DNA, 21 bp, synthetic construct
  source 1..21: mol_type = other DNA
  modified_base 1: mod_base = OTHER; note = guanosine-3'-phosphate
  modified_base 2: mod_base = OTHER; note = uridine-3'-phosphate
  modified_base 3: mod_base = OTHER; note = guanosine-3'-phosphate
  modified_base 4: mod_base = OTHER; note = cytidine-3'-phosphate
  modified_base 5: mod_base = OTHER; note = cytidine-3'-phosphate
  modified_base 6: mod_base = OTHER; note = guanosine-3'-phosphate
  modified_base 7: mod_base = OTHER; note = adenosine-3'-phosphate
  modified_base 8: mod_base = OTHER; note = guanosine-3'-phosphate
  modified_base 9: mod_base = OTHER; note = adenosine-3'-phosphate
  modified_base 10: mod_base = OTHER; note = cytidine-3'-phosphate
  modified_base 11: mod_base = OTHER; note = adenosine-3'-phosphate
  modified_base 12: mod_base = OTHER; note = guanosine-3'-phosphate
  modified_base 13: mod_base = OTHER; note = cytidine-3'-phosphate
  modified_base 14: mod_base = OTHER; note = uridine-3'-phosphate
  modified_base 15: mod_base = OTHER; note = cytidine-3'-phosphate
  modified_base 16: mod_base = OTHER; note = adenosine-3'-phosphate
  modified_base 17: mod_base = OTHER; note = cytidine-3'-phosphate
  modified_base 18: mod_base = OTHER; note = adenosine-3'-phosphate
  modified_base 19: mod_base = OTHER; note = guanosine-3'-phosphate
  misc_feature 1..19: note = RNA
  misc_feature 20..21: note = DNA
gtgccgagacagctcacagtt

SEQ ID NO: 1057 - DNA, 21 bp, synthetic construct
  source 1..21: mol_type = other DNA
  modified_base 1: mod_base = OTHER; note = uridine-3'-phosphate
  modified_base 2: mod_base = OTHER; note = guanosine-3'-phosphate
  modified_base 3: mod_base = OTHER; note = cytidine-3'-phosphate
  modified_base 4: mod_base = OTHER; note = adenosine-3'-phosphate
  modified_base 5: mod_base = OTHER; note = adenosine-3'-phosphate
  modified_base 6: mod_base = OTHER; note = guanosine-3'-phosphate
  modified_base 7: mod_base = OTHER; note = uridine-3'-phosphate
  modified_base 8: mod_base = OTHER; note = guanosine-3'-phosphate
  modified_base 9: mod_base = OTHER; note = guanosine-3'-phosphate
  modified_base 10: mod_base = OTHER; note = guanosine-3'-phosphate
  modified_base 11: mod_base = OTHER; note = uridine-3'-phosphate
  modified_base 12: mod_base = OTHER; note = guanosine-3'-phosphate
  modified_base 13: mod_base = OTHER; note = cytidine-3'-phosphate
  modified_base 14: mod_base = OTHER; note = cytidine-3'-phosphate
  modified_base 15: mod_base = OTHER; note = guanosine-3'-phosphate
  modified_base 16: mod_base = OTHER; note = adenosine-3'-phosphate
  modified_base 17: mod_base = OTHER; note = guanosine-3'-phosphate
  modified_base 18: mod_base = OTHER; note = adenosine-3'-phosphate
  modified_base 19: mod_base = OTHER; note = cytidine-3'-phosphate
  misc_feature 1..19: note = RNA
  misc_feature 20..21: note = DNA
tgcaagtgggtgccgagactt

SEQ ID NO: 1058 - DNA, 21 bp, synthetic construct
  source 1..21: mol_type = other DNA
  modified_base 1: mod_base = OTHER; note = cytidine-3'-phosphate
  modified_base 2: mod_base = OTHER; note = guanosine-3'-phosphate
  modified_base 3: mod_base = OTHER; note = guanosine-3'-phosphate
  modified_base 4: mod_base = OTHER; note = cytidine-3'-phosphate
  modified_base 5: mod_base = OTHER; note = adenosine-3'-phosphate
  modified_base 6: mod_base = OTHER; note = guanosine-3'-phosphate
  modified_base 7: mod_base = OTHER; note = uridine-3'-phosphate
  modified_base 8: mod_base = OTHER; note = guanosine-3'-phosphate
  modified_base 9: mod_base = OTHER; note = adenosine-3'-phosphate
  modified_base 10: mod_base = OTHER; note = cytidine-3'-phosphate
  modified_base 11: mod_base = OTHER; note = uridine-3'-phosphate
  modified_base 12: mod_base = OTHER; note = guanosine-3'-phosphate
  modified_base 13: mod_base = OTHER; note = cytidine-3'-phosphate
  modified_base 14: mod_base = OTHER; note = adenosine-3'-phosphate
  modified_base 15: mod_base = OTHER; note = adenosine-3'-phosphate
  modified_base 16: mod_base = OTHER; note = guanosine-3'-phosphate
  modified_base 17: mod_base = OTHER; note = uridine-3'-phosphate
  modified_base 18: mod_base = OTHER; note = guanosine-3'-phosphate
  modified_base 19: mod_base = OTHER; note = guanosine-3'-phosphate
  misc_feature 1..19: note = RNA
  misc_feature 20..21: note = DNA
cggcagtgactgcaagtggtt

SEQ ID NO: 1059 - DNA, 21 bp, synthetic construct
  source 1..21: mol_type = other DNA
  modified_base 1: mod_base = OTHER; note = adenosine-3'-phosphate
  modified_base 2: mod_base = OTHER; note = adenosine-3'-phosphate
  modified_base 3: mod_base = OTHER; note = cytidine-3'-phosphate
  modified_base 4: mod_base = OTHER; note = adenosine-3'-phosphate
  modified_base 5: mod_base = OTHER; note = uridine-3'-phosphate
  modified_base 6: mod_base = OTHER; note = cytidine-3'-phosphate
  modified_base 7: mod_base = OTHER; note = adenosine-3'-phosphate
  modified_base 8: mod_base = OTHER; note = guanosine-3'-phosphate
  modified_base 9: mod_base = OTHER; note = guanosine-3'-phosphate
  modified_base 10: mod_base = OTHER; note = cytidine-3'-phosphate
  modified_base 11: mod_base = OTHER; note = guanosine-3'-phosphate
  modified_base 12: mod_base = OTHER; note = guanosine-3'-phosphate
  modified_base 13: mod_base = OTHER; note = cytidine-3'-phosphate
  modified_base 14: mod_base = OTHER; note = adenosine-3'-phosphate
  modified_base 15: mod_base = OTHER; note = guanosine-3'-phosphate
  modified_base 16: mod_base = OTHER; note = uridine-3'-phosphate
  modified_base 17: mod_base = OTHER; note = guanosine-3'-phosphate
  modified_base 18: mod_base = OTHER; note = adenosine-3'-phosphate
  modified_base 19: mod_base = OTHER; note = cytidine-3'-phosphate
  misc_feature 1..19: note = RNA
  misc_feature 20..21: note = DNA
aacatcaggcggcagtgactt

SEQ ID NO: 1060 - DNA, 21 bp, synthetic construct
  source 1..21: mol_type = other DNA
  modified_base 1: mod_base = OTHER; note = adenosine-3'-phosphate
  modified_base 2: mod_base = OTHER; note = adenosine-3'-phosphate
  modified_base 3: mod_base = OTHER; note = guanosine-3'-phosphate
  modified_base 4: mod_base = OTHER; note = adenosine-3'-phosphate
  modified_base 5: mod_base = OTHER; note = guanosine-3'-phosphate
  modified_base 6: mod_base = OTHER; note = uridine-3'-phosphate
  modified_base 7: mod_base = OTHER; note = adenosine-3'-phosphate
  modified_base 8: mod_base = OTHER; note = adenosine-3'-phosphate
  modified_base 9: mod_base = OTHER; note = cytidine-3'-phosphate
  modified_base 10: mod_base = OTHER; note = adenosine-3'-phosphate
  modified_base 11: mod_base = OTHER; note = adenosine-3'-phosphate
  modified_base 12: mod_base = OTHER; note = cytidine-3'-phosphate
  modified_base 13: mod_base = OTHER; note = adenosine-3'-phosphate
  modified_base 14: mod_base = OTHER; note = uridine-3'-phosphate
  modified_base 15: mod_base = OTHER; note = cytidine-3'-phosphate
  modified_base 16: mod_base = OTHER; note = adenosine-3'-phosphate
  modified_base 17: mod_base = OTHER; note = guanosine-3'-phosphate
  modified_base 18: mod_base = OTHER; note = guanosine-3'-phosphate
  modified_base 19: mod_base = OTHER; note = cytidine-3'-phosphate
  misc_feature 1..19: note = RNA
  misc_feature 20..21: note = DNA
aagagtaacaacatcaggctt

SEQ ID NO: 1061 - DNA, 21 bp, synthetic construct
  source 1..21: mol_type = other DNA
  modified_base 1: mod_base = OTHER; note = uridine-3'-phosphate
  modified_base 2: mod_base = OTHER; note = uridine-3'-phosphate
  modified_base 3: mod_base = OTHER; note = uridine-3'-phosphate
  modified_base 4: mod_base = OTHER; note = uridine-3'-phosphate
  modified_base 5: mod_base = OTHER; note = guanosine-3'-phosphate
  modified_base 6: mod_base = OTHER; note = guanosine-3'-phosphate
  modified_base 7: mod_base = OTHER; note = adenosine-3'-phosphate
  modified_base 8: mod_base = OTHER; note = guanosine-3'-phosphate
  modified_base 9: mod_base = OTHER; note = uridine-3'-phosphate
  modified_base 10: mod_base = OTHER; note = guanosine-3'-phosphate
  modified_base 11: mod_base = OTHER; note = guanosine-3'-phosphate
  modified_base 12: mod_base = OTHER; note = adenosine-3'-phosphate
  modified_base 13: mod_base = OTHER; note = adenosine-3'-phosphate
  modified_base 14: mod_base = OTHER; note = guanosine-3'-phosphate
  modified_base 15: mod_base = OTHER; note = adenosine-3'-phosphate
  modified_base 16: mod_base = OTHER; note = guanosine-3'-phosphate
  modified_base 17: mod_base = OTHER; note = uridine-3'-phosphate
  modified_base 18: mod_base = OTHER; note = adenosine-3'-phosphate
  modified_base 19: mod_base = OTHER; note = adenosine-3'-phosphate
  misc_feature 1..19: note = RNA
  misc_feature 20..21: note = DNA
ttttggagtggaagagtaatt

SEQ ID NO: 1062 - DNA, 21 bp, synthetic construct
  source 1..21: mol_type = other DNA
  modified_base 1: mod_base = OTHER; note = adenosine-3'-phosphate
  modified_base 2: mod_base = OTHER; note = cytidine-3'-phosphate
  modified_base 3: mod_base = OTHER; note = guanosine-3'-phosphate
  modified_base 4: mod_base = OTHER; note = guanosine-3'-phosphate
  modified_base 5: mod_base = OTHER; note = guanosine-3'-phosphate
  modified_base 6: mod_base = OTHER; note = cytidine-3'-phosphate
  modified_base 7: mod_base = OTHER; note = adenosine-3'-phosphate
  modified_base 8: mod_base = OTHER; note = uridine-3'-phosphate
  modified_base 9: mod_base = OTHER; note = cytidine-3'-phosphate
  modified_base 10: mod_base = OTHER; note = cytidine-3'-phosphate
  modified_base 11: mod_base = OTHER; note = uridine-3'-phosphate
  modified_base 12: mod_base = OTHER; note = uridine-3'-phosphate
  modified_base 13: mod_base = OTHER; note = uridine-3'-phosphate
  modified_base 14: mod_base = OTHER; note = uridine-3'-phosphate
  modified_base 15: mod_base = OTHER; note = guanosine-3'-phosphate
  modified_base 16: mod_base = OTHER; note = guanosine-3'-phosphate
  modified_base 17: mod_base = OTHER; note = adenosine-3'-phosphate
  modified_base 18: mod_base = OTHER; note = guanosine-3'-phosphate
  modified_base 19: mod_base = OTHER; note = uridine-3'-phosphate
  misc_feature 1..19: note = RNA
  misc_feature 20..21: note = DNA
acgggcatccttttggagttt

SEQ ID NO: 1063 - DNA, 21 bp, synthetic construct
  source 1..21: mol_type = other DNA
  modified_base 1: mod_base = OTHER; note = guanosine-3'-phosphate
  modified_base 2: mod_base = OTHER; note = guanosine-3'-phosphate
  modified_base 3: mod_base = OTHER; note = guanosine-3'-phosphate
  modified_base 4: mod_base = OTHER; note = guanosine-3'-phosphate
  modified_base 5: mod_base = OTHER; note = cytidine-3'-phosphate
  modified_base 6: mod_base = OTHER; note = cytidine-3'-phosphate
  modified_base 7: mod_base = OTHER; note = uridine-3'-phosphate
  modified_base 8: mod_base = OTHER; note = cytidine-3'-phosphate
  modified_base 9: mod_base = OTHER; note = guanosine-3'-phosphate
  modified_base 10: mod_base = OTHER; note = guanosine-3'-phosphate
  modified_base 11: mod_base = OTHER; note = cytidine-3'-phosphate
  modified_base 12: mod_base = OTHER; note = cytidine-3'-phosphate
  modified_base 13: mod_base = OTHER; note = adenosine-3'-phosphate
  modified_base 14: mod_base = OTHER; note = cytidine-3'-phosphate
  modified_base 15: mod_base = OTHER; note = guanosine-3'-phosphate
  modified_base 16: mod_base = OTHER; note = guanosine-3'-phosphate
  modified_base 17: mod_base = OTHER; note = guanosine-3'-phosphate
  modified_base 18: mod_base = OTHER; note = cytidine-3'-phosphate
  modified_base 19: mod_base = OTHER; note = adenosine-3'-phosphate
  misc_feature 1..19: note = RNA
  misc_feature 20..21: note = DNA
ggggcctcggccacgggcatt

SEQ ID NO: 1064 - DNA, 21 bp, synthetic construct
  source 1..21: mol_type = other DNA
  modified_base 1: mod_base = OTHER; note = adenosine-3'-phosphate
  modified_base 2: mod_base = OTHER; note = cytidine-3'-phosphate
  modified_base 3: mod_base = OTHER; note = cytidine-3'-phosphate
  modified_base 4: mod_base = OTHER; note = uridine-3'-phosphate
  modified_base 5: mod_base = OTHER; note = guanosine-3'-phosphate
  modified_base 6: mod_base = OTHER; note = guanosine-3'-phosphate
  modified_base 7: mod_base = OTHER; note = guanosine-3'-phosphate
  modified_base 8: mod_base = OTHER; note = guanosine-3'-phosphate
  modified_base 9: mod_base = OTHER; note = guanosine-3'-phosphate
  modified_base 10: mod_base = OTHER; note = guanosine-3'-phosphate
  modified_base 11: mod_base = OTHER; note = cytidine-3'-phosphate
  modified_base 12: mod_base = OTHER; note = cytidine-3'-phosphate
  modified_base 13: mod_base = OTHER; note = uridine-3'-phosphate
  modified_base 14: mod_base = OTHER; note = cytidine-3'-phosphate
  modified_base 15: mod_base = OTHER; note = guanosine-3'-phosphate
  modified_base 16: mod_base = OTHER; note = guanosine-3'-phosphate
  modified_base 17: mod_base = OTHER; note = cytidine-3'-phosphate
  modified_base 18: mod_base = OTHER; note = cytidine-3'-phosphate
  modified_base 19: mod_base = OTHER; note = adenosine-3'-phosphate
  misc_feature 1..19: note = RNA
  misc_feature 20..21: note = DNA
acctggggggcctcggccatt

SEQ ID NO: 1065 - DNA, 21 bp, synthetic construct
  source 1..21: mol_type = other DNA
  modified_base 1: mod_base = OTHER; note = cytidine-3'-phosphate
  modified_base 2: mod_base = OTHER; note = uridine-3'-phosphate
  modified_base 3: mod_base = OTHER; note = guanosine-3'-phosphate
  modified_base 4: mod_base = OTHER; note = cytidine-3'-phosphate
  modified_base 5: mod_base = OTHER; note = cytidine-3'-phosphate
  modified_base 6: mod_base = OTHER; note = cytidine-3'-phosphate
  modified_base 7: mod_base = OTHER; note = guanosine-3'-phosphate
  modified_base 8: mod_base = OTHER; note = cytidine-3'-phosphate
  modified_base 9: mod_base = OTHER; note = cytidine-3'-phosphate
  modified_base 10: mod_base = OTHER; note = adenosine-3'-phosphate
  modified_base 11: mod_base = OTHER; note = guanosine-3'-phosphate
  modified_base 12: mod_base = OTHER; note = cytidine-3'-phosphate
  modified_base 13: mod_base = OTHER; note = cytidine-3'-phosphate
  modified_base 14: mod_base = OTHER; note = adenosine-3'-phosphate
  modified_base 15: mod_base = OTHER; note = cytidine-3'-phosphate
  modified_base 16: mod_base = OTHER; note = cytidine-3'-phosphate
  modified_base 17: mod_base = OTHER; note = uridine-3'-phosphate
  modified_base 18: mod_base = OTHER; note = guanosine-3'-phosphate
  modified_base 19: mod_base = OTHER; note = guanosine-3'-phosphate
  misc_feature 1..19: note = RNA
  misc_feature 20..21: note = DNA
ctgcccgccagccacctggtt

SEQ ID NO: 1066 - DNA, 21 bp, synthetic construct
  source 1..21: mol_type = other DNA
  modified_base 1: mod_base = OTHER; note = cytidine-3'-phosphate
  modified_base 2: mod_base = OTHER; note = cytidine-3'-phosphate
  modified_base 3: mod_base = OTHER; note = uridine-3'-phosphate
  modified_base 4: mod_base = OTHER; note = cytidine-3'-phosphate
  modified_base 5: mod_base = OTHER; note = cytidine-3'-phosphate
  modified_base 6: mod_base = OTHER; note = guanosine-3'-phosphate
  modified_base 7: mod_base = OTHER; note = uridine-3'-phosphate
  modified_base 8: mod_base = OTHER; note = cytidine-3'-phosphate
  modified_base 9: mod_base = OTHER; note = cytidine-3'-phosphate
  modified_base 10: mod_base = OTHER; note = cytidine-3'-phosphate
  modified_base 11: mod_base = OTHER; note = cytidine-3'-phosphate
  modified_base 12: mod_base = OTHER; note = cytidine-3'-phosphate
  modified_base 13: mod_base = OTHER; note = uridine-3'-phosphate
  modified_base 14: mod_base = OTHER; note = guanosine-3'-phosphate
  modified_base 15: mod_base = OTHER; note = cytidine-3'-phosphate
  modified_base 16: mod_base = OTHER; note = cytidine-3'-phosphate
  modified_base 17: mod_base = OTHER; note = cytidine-3'-phosphate
  modified_base 18: mod_base = OTHER; note = guanosine-3'-phosphate
  modified_base 19: mod_base = OTHER; note = cytidine-3'-phosphate
  misc_feature 1..19: note = RNA
  misc_feature 20..21: note = DNA
cctccgtccccctgcccgctt

SEQ ID NO: 1067 - DNA, 21 bp, synthetic construct
  source 1..21: mol_type = other DNA
  modified_base 1: mod_base = OTHER; note = cytidine-3'-phosphate
  modified_base 2: mod_base = OTHER; note = uridine-3'-phosphate
  modified_base 3: mod_base = OTHER; note = cytidine-3'-phosphate
  modified_base 4: mod_base = OTHER; note = guanosine-3'-phosphate
  modified_base 5: mod_base = OTHER; note = cytidine-3'-phosphate
  modified_base 6: mod_base = OTHER; note = cytidine-3'-phosphate
  modified_base 7: mod_base = OTHER; note = adenosine-3'-phosphate
  modified_base 8: mod_base = OTHER; note = uridine-3'-phosphate
  modified_base 9: mod_base = OTHER; note = cytidine-3'-phosphate
  modified_base 10: mod_base = OTHER; note = adenosine-3'-phosphate
  modified_base 11: mod_base = OTHER; note = cytidine-3'-phosphate
  modified_base 12: mod_base = OTHER; note = cytidine-3'-phosphate
  modified_base 13: mod_base = OTHER; note = uridine-3'-phosphate
  modified_base 14: mod_base = OTHER; note = cytidine-3'-phosphate
  modified_base 15: mod_base = OTHER; note = cytidine-3'-phosphate
  modified_base 16: mod_base = OTHER; note = guanosine-3'-phosphate
  modified_base 17: mod_base = OTHER; note = uridine-3'-phosphate
  modified_base 18: mod_base = OTHER; note = cytidine-3'-phosphate
  modified_base 19: mod_base = OTHER; note = cytidine-3'-phosphate
  misc_feature 1..19: note = RNA
  misc_feature 20..21: note = DNA
ctcgccatcacctccgtcctt

SEQ ID NO: 1068 - DNA, 21 bp, synthetic construct
  source 1..21: mol_type = other DNA
  modified_base 1: mod_base = OTHER; note = uridine-3'-phosphate
  modified_base 2: mod_base = OTHER; note = cytidine-3'-phosphate
  modified_base 3: mod_base = OTHER; note = cytidine-3'-phosphate
  modified_base 4: mod_base = OTHER; note = guanosine-3'-phosphate
  modified_base 5: mod_base = OTHER; note = cytidine-3'-phosphate
  modified_base 6: mod_base = OTHER; note = uridine-3'-phosphate
  modified_base 7: mod_base = OTHER; note = uridine-3'-phosphate
  modified_base 8: mod_base = OTHER; note = cytidine-3'-phosphate
  modified_base 9: mod_base = OTHER; note = cytidine-3'-phosphate
  modified_base 10: mod_base = OTHER; note = uridine-3'-phosphate
  modified_base 11: mod_base = OTHER; note = cytidine-3'-phosphate
  modified_base 12: mod_base = OTHER; note = guanosine-3'-phosphate
  modified_base 13: mod_base = OTHER; note = cytidine-3'-phosphate
  modified_base 14: mod_base = OTHER; note = cytidine-3'-phosphate
  modified_base 15: mod_base = OTHER; note = adenosine-3'-phosphate
  modified_base 16: mod_base = OTHER; note = uridine-3'-phosphate
  modified_base 17: mod_base = OTHER; note = cytidine-3'-phosphate
  modified_base 18: mod_base = OTHER; note = adenosine-3'-phosphate
  modified_base 19: mod_base = OTHER; note = cytidine-3'-phosphate
  misc_feature 1..19: note = RNA
  misc_feature 20..21: note = DNA
tccgcttcctcgccatcactt

SEQ ID NO: 1069 - DNA, 21 bp, synthetic construct
  source 1..21: mol_type = other DNA
  modified_base 1: mod_base = OTHER; note = uridine-3'-phosphate
  modified_base 2: mod_base = OTHER; note = cytidine-3'-phosphate
  modified_base 3: mod_base = OTHER; note = cytidine-3'-phosphate
  modified_base 4: mod_base = OTHER; note = cytidine-3'-phosphate
  modified_base 5: mod_base = OTHER; note = cytidine-3'-phosphate
  modified_base 6: mod_base = OTHER; note = uridine-3'-phosphate
  modified_base 7: mod_base = OTHER; note = cytidine-3'-phosphate
  modified_base 8: mod_base = OTHER; note = cytidine-3'-phosphate
  modified_base 9: mod_base = OTHER; note = guanosine-3'-phosphate
  modified_base 10: mod_base = OTHER; note = guanosine-3'-phosphate
  modified_base 11: mod_base = OTHER; note = cytidine-3'-phosphate
  modified_base 12: mod_base = OTHER; note = uridine-3'-phosphate
  modified_base 13: mod_base = OTHER; note = cytidine-3'-phosphate
  modified_base 14: mod_base = OTHER; note = cytidine-3'-phosphate
  modified_base 15: mod_base = OTHER; note = guanosine-3'-phosphate
  modified_base 16: mod_base = OTHER; note = cytidine-3'-phosphate
  modified_base 17: mod_base = OTHER; note = uridine-3'-phosphate
  modified_base 18: mod_base = OTHER; note = uridine-3'-phosphate
  modified_base 19: mod_base = OTHER; note = cytidine-3'-phosphate
  misc_feature 1..19: note = RNA
  misc_feature 20..21: note = DNA
tcccctccggctccgcttctt

SEQ ID NO: 1070 - DNA, 21 bp, synthetic construct
  source 1..21: mol_type = other DNA
  modified_base 1: mod_base = OTHER; note = cytidine-3'-phosphate
  modified_base 2: mod_base = OTHER; note = uridine-3'-phosphate
  modified_base 3: mod_base = OTHER; note = uridine-3'-phosphate
  modified_base 4: mod_base = OTHER; note = guanosine-3'-phosphate
  modified_base 5: mod_base = OTHER; note = adenosine-3'-phosphate
  modified_base 6: mod_base = OTHER; note = adenosine-3'-phosphate
  modified_base 7: mod_base = OTHER; note = cytidine-3'-phosphate
  modified_base 8: mod_base = OTHER; note = adenosine-3'-phosphate
  modified_base 9: mod_base = OTHER; note = uridine-3'-phosphate
  modified_base 10: mod_base = OTHER; note = cytidine-3'-phosphate
  modified_base 11: mod_base = OTHER; note = cytidine-3'-phosphate
  modified_base 12: mod_base = OTHER; note = cytidine-3'-phosphate
  modified_base 13: mod_base = OTHER; note = cytidine-3'-phosphate
  modified_base 14: mod_base = OTHER; note = uridine-3'-phosphate
  modified_base 15: mod_base = OTHER; note = cytidine-3'-phosphate
  modified_base 16: mod_base = OTHER; note = cytidine-3'-phosphate
  modified_base 17: mod_base = OTHER; note = guanosine-3'-phosphate
  modified_base 18: mod_base = OTHER; note = guanosine-3'-phosphate
  modified_base 19: mod_base = OTHER; note = cytidine-3'-phosphate
  misc_feature 1..19: note = RNA
  misc_feature 20..21: note = DNA
cttgaacatcccctccggctt

SEQ ID NO: 1071 - DNA, 21 bp, synthetic construct
  source 1..21: mol_type = other DNA
  modified_base 1: mod_base = OTHER; note = uridine-3'-phosphate
  modified_base 2: mod_base = OTHER; note = cytidine-3'-phosphate
  modified_base 3: mod_base = OTHER; note = cytidine-3'-phosphate
  modified_base 4: mod_base = OTHER; note = uridine-3'-phosphate
  modified_base 5: mod_base = OTHER; note = cytidine-3'-phosphate
  modified_base 6: mod_base = OTHER; note = adenosine-3'-phosphate
  modified_base 7: mod_base = OTHER; note = cytidine-3'-phosphate
  modified_base 8: mod_base = OTHER; note = adenosine-3'-phosphate
  modified_base 9: mod_base = OTHER; note = guanosine-3'-phosphate
  modified_base 10: mod_base = OTHER; note = guanosine-3'-phosphate
  modified_base 11: mod_base = OTHER; note = cytidine-3'-phosphate
  modified_base 12: mod_base = OTHER; note = cytidine-3'-phosphate
  modified_base 13: mod_base = OTHER; note = uridine-3'-phosphate
  modified_base 14: mod_base = OTHER; note = uridine-3'-phosphate
  modified_base 15: mod_base = OTHER; note = guanosine-3'-phosphate
  modified_base 16: mod_base = OTHER; note = adenosine-3'-phosphate
  modified_base 17: mod_base = OTHER; note = adenosine-3'-phosphate
  modified_base 18: mod_base = OTHER; note = cytidine-3'-phosphate
  modified_base 19: mod_base = OTHER; note = adenosine-3'-phosphate
  misc_feature 1..19: note = RNA
  misc_feature 20..21: note = DNA
tcctcacaggccttgaacatt

SEQ ID NO: 1072 - DNA, 21 bp, synthetic construct
  source 1..21: mol_type = other DNA
  modified_base 1: mod_base = OTHER; note = uridine-3'-phosphate
  modified_base 2: mod_base = OTHER; note = cytidine-3'-phosphate
  modified_base 3: mod_base = OTHER; note = uridine-3'-phosphate
  modified_base 4: mod_base = OTHER; note = cytidine-3'-phosphate
  modified_base 5: mod_base = OTHER; note = uridine-3'-phosphate
  modified_base 6: mod_base = OTHER; note = uridine-3'-phosphate
  modified_base 7: mod_base = OTHER; note = guanosine-3'-phosphate
  modified_base 8: mod_base = OTHER; note = guanosine-3'-phosphate
  modified_base 9: mod_base = OTHER; note = adenosine-3'-phosphate
  modified_base 10: mod_base = OTHER; note = guanosine-3'-phosphate
  modified_base 11: mod_base = OTHER; note = uridine-3'-phosphate
  modified_base 12: mod_base = OTHER; note = cytidine-3'-phosphate
  modified_base 13: mod_base = OTHER; note = cytidine-3'-phosphate
  modified_base 14: mod_base = OTHER; note = uridine-3'-phosphate
  modified_base 15: mod_base = OTHER; note = cytidine-3'-phosphate
  modified_base 16: mod_base = OTHER; note = adenosine-3'-phosphate
  modified_base 17: mod_base = OTHER; note = cytidine-3'-phosphate
  modified_base 18: mod_base = OTHER; note = adenosine-3'-phosphate
  modified_base 19: mod_base = OTHER; note = guanosine-3'-phosphate
  misc_feature 1..19: note = RNA
  misc_feature 20..21: note = DNA
tctcttggagtcctcacagtt

SEQ ID NO: 1073 - DNA, 21 bp, synthetic construct
  source 1..21: mol_type = other DNA
  modified_base 1: mod_base = OTHER; note = cytidine-3'-phosphate
  modified_base 2: mod_base = OTHER; note = guanosine-3'-phosphate
  modified_base 3: mod_base = OTHER; note = guanosine-3'-phosphate
  modified_base 4: mod_base = OTHER; note = guanosine-3'-phosphate
  modified_base 5: mod_base = OTHER; note = cytidine-3'-phosphate
  modified_base 6: mod_base = OTHER; note = uridine-3'-phosphate
  modified_base 7: mod_base = OTHER; note = uridine-3'-phosphate
  modified_base 8: mod_base = OTHER; note = uridine-3'-phosphate
  modified_base 9: mod_base = OTHER; note = uridine-3'-phosphate
  modified_base 10: mod_base = OTHER; note = cytidine-3'-phosphate
  modified_base 11: mod_base = OTHER; note = uridine-3'-phosphate
  modified_base 12: mod_base = OTHER; note = cytidine-3'-phosphate
  modified_base 13: mod_base = OTHER; note = uridine-3'-phosphate
  modified_base 14: mod_base = OTHER; note = uridine-3'-phosphate
  modified_base 15: mod_base = OTHER; note = guanosine-3'-phosphate
  modified_base 16: mod_base = OTHER; note = guanosine-3'-phosphate
  modified_base 17: mod_base = OTHER; note = adenosine-3'-phosphate
  modified_base 18: mod_base = OTHER; note = guanosine-3'-phosphate
  modified_base 19: mod_base = OTHER; note = uridine-3'-phosphate
  misc_feature 1..19: note = RNA
  misc_feature 20..21: note = DNA
cgggcttttctcttggagttt

SEQ ID NO: 1074 - DNA, 21 bp, synthetic construct
  source 1..21: mol_type = other DNA
  modified_base 1: mod_base = OTHER; note = guanosine-3'-phosphate
  modified_base 2: mod_base = OTHER; note = guanosine-3'-phosphate
  modified_base 3: mod_base = OTHER; note = cytidine-3'-phosphate
  modified_base 4: mod_base = OTHER; note = guanosine-3'-phosphate
  modified_base 5: mod_base = OTHER; note = guanosine-3'-phosphate
  modified_base 6: mod_base = OTHER; note = adenosine-3'-phosphate
  modified_base 7: mod_base = OTHER; note = guanosine-3'-phosphate
  modified_base 8: mod_base = OTHER; note = guanosine-3'-phosphate
  modified_base 9: mod_base = OTHER; note = uridine-3'-phosphate
  modified_base 10: mod_base = OTHER; note = adenosine-3'-phosphate
  modified_base 11: mod_base = OTHER; note = guanosine-3'-phosphate
  modified_base 12: mod_base = OTHER; note = cytidine-3'-phosphate
  modified_base 13: mod_base = OTHER; note = cytidine-3'-phosphate
  modified_base 14: mod_base = OTHER; note = cytidine-3'-phosphate
  modified_base 15: mod_base = OTHER; note = cytidine-3'-phosphate
  modified_base 16: mod_base = OTHER; note = guanosine-3'-phosphate
  modified_base 17: mod_base = OTHER; note = guanosine-3'-phosphate
  modified_base 18: mod_base = OTHER; note = guanosine-3'-phosphate
  modified_base 19: mod_base = OTHER; note = cytidine-3'-phosphate
  misc_feature 1..19: note = RNA
  misc_feature 20..21: note = DNA
ggcggaggtagccccgggctt

SEQ ID NO: 1075 - DNA, 21 bp, synthetic construct
  source 1..21: mol_type = other DNA
  modified_base 1: mod_base = OTHER; note = adenosine-3'-phosphate
  modified_base 2: mod_base = OTHER; note = guanosine-3'-phosphate
  modified_base 3: mod_base = OTHER; note = guanosine-3'-phosphate
  modified_base 4: mod_base = OTHER; note = guanosine-3'-phosphate
  modified_base 5: mod_base = OTHER; note = guanosine-3'-phosphate
  modified_base 6: mod_base = OTHER; note = cytidine-3'-phosphate
  modified_base 7: mod_base = OTHER; note = adenosine-3'-phosphate
  modified_base 8: mod_base = OTHER; note = cytidine-3'-phosphate
  modified_base 9: mod_base = OTHER; note = cytidine-3'-phosphate
  modified_base 10: mod_base = OTHER; note = adenosine-3'-phosphate
  modified_base 11: mod_base = OTHER; note = guanosine-3'-phosphate
  modified_base 12: mod_base = OTHER; note = guanosine-3'-phosphate
  modified_base 13: mod_base = OTHER; note = cytidine-3'-phosphate
  modified_base 14: mod_base = OTHER; note = guanosine-3'-phosphate
  modified_base 15: mod_base = OTHER; note = guanosine-3'-phosphate
  modified_base 16: mod_base = OTHER; note = adenosine-3'-phosphate
  modified_base 17: mod_base = OTHER; note = guanosine-3'-phosphate
  modified_base 18: mod_base = OTHER; note = guanosine-3'-phosphate
  modified_base 19: mod_base = OTHER; note = uridine-3'-phosphate
  misc_feature 1..19: note = RNA
  misc_feature 20..21: note = DNA
aggggcaccaggcggaggttt

SEQ ID NO: 1076 - DNA, 21 bp, synthetic construct
  source 1..21: mol_type = other DNA
  modified_base 1: mod_base = OTHER; note = adenosine-3'-phosphate
  modified_base 2: mod_base = OTHER; note = cytidine-3'-phosphate
  modified_base 3: mod_base = OTHER; note = adenosine-3'-phosphate
  modified_base 4: mod_base = OTHER; note = adenosine-3'-phosphate
  modified_base 5: mod_base = OTHER; note = adenosine-3'-phosphate
  modified_base 6: mod_base = OTHER; note = cytidine-3'-phosphate
  modified_base 7: mod_base = OTHER; note = adenosine-3'-phosphate
  modified_base 8: mod_base = OTHER; note = guanosine-3'-phosphate
  modified_base 9: mod_base = OTHER; note = guanosine-3'-phosphate
  modified_base 10: mod_base = OTHER; note = guanosine-3'-phosphate
  modified_base 11: mod_base = OTHER; note = guanosine-3'-phosphate
  modified_base 12: mod_base = OTHER; note = cytidine-3'-phosphate
  modified_base 13: mod_base = OTHER; note = adenosine-3'-phosphate
  modified_base 14: mod_base = OTHER; note = cytidine-3'-phosphate
  modified_base 15: mod_base = OTHER; note = cytidine-3'-phosphate
  modified_base 16: mod_base = OTHER; note = adenosine-3'-phosphate
  modified_base 17: mod_base = OTHER; note = guanosine-3'-phosphate
  modified_base 18: mod_base = OTHER; note = guanosine-3'-phosphate
  modified_base 19: mod_base = OTHER; note = cytidine-3'-phosphate
  misc_feature 1..19: note = RNA
  misc_feature 20..21: note = DNA
acaaacaggggcaccaggctt

SEQ ID NO: 1077 - DNA, 21 bp, synthetic construct
  source 1..21: mol_type = other DNA
  modified_base 1: mod_base = OTHER; note = adenosine-3'-phosphate
  modified_base 2: mod_base = OTHER; note = guanosine-3'-phosphate
  modified_base 3: mod_base = OTHER; note = guanosine-3'-phosphate
  modified_base 4: mod_base = OTHER; note = guanosine-3'-phosphate
  modified_base 5: mod_base = OTHER; note = cytidine-3'-phosphate
  modified_base 6: mod_base = OTHER; note = cytidine-3'-phosphate
  modified_base 7: mod_base = OTHER; note = adenosine-3'-phosphate
  modified_base 8: mod_base = OTHER; note = guanosine-3'-phosphate
  modified_base 9: mod_base = OTHER; note = cytidine-3'-phosphate
  modified_base 10: mod_base = OTHER; note = adenosine-3'-phosphate
  modified_base 11: mod_base = OTHER; note = guanosine-3'-phosphate
  modified_base 12: mod_base = OTHER; note = cytidine-3'-phosphate
  modified_base 13: mod_base = OTHER; note = adenosine-3'-phosphate
  modified_base 14: mod_base = OTHER; note = cytidine-3'-phosphate
  modified_base 15: mod_base = OTHER; note = adenosine-3'-phosphate
  modified_base 16: mod_base = OTHER; note = adenosine-3'-phosphate
  modified_base 17: mod_base = OTHER; note = adenosine-3'-phosphate
  modified_base 18: mod_base = OTHER; note = cytidine-3'-phosphate
  modified_base 19: mod_base = OTHER; note = adenosine-3'-phosphate
  misc_feature 1..19: note = RNA
  misc_feature 20..21: note = DNA
agggccagcagcacaaacatt

SEQ ID NO: 1078 - DNA, 21 bp, synthetic construct
  source 1..21: mol_type = other DNA
  modified_base 1: mod_base = OTHER; note = adenosine-3'-phosphate
  modified_base 2: mod_base = OTHER; note = guanosine-3'-phosphate
  modified_base 3: mod_base = OTHER; note = cytidine-3'-phosphate
  modified_base 4: mod_base = OTHER; note = adenosine-3'-phosphate
  modified_base 5: mod_base = OTHER; note = cytidine-3'-phosphate
  modified_base 6: mod_base = OTHER; note = guanosine-3'-phosphate
  modified_base 7: mod_base = OTHER; note = adenosine-3'-phosphate
  modified_base 8: mod_base = OTHER; note = guanosine-3'-phosphate
  modified_base 9: mod_base = OTHER; note = cytidine-3'-phosphate
  modified_base 10: mod_base = OTHER; note = adenosine-3'-phosphate
  modified_base 11: mod_base = OTHER; note = guanosine-3'-phosphate
  modified_base 12: mod_base = OTHER; note = guanosine-3'-phosphate
  modified_base 13: mod_base = OTHER; note = guanosine-3'-phosphate
  modified_base 14: mod_base = OTHER; note = cytidine-3'-phosphate
  modified_base 15: mod_base = OTHER; note = cytidine-3'-phosphate
  modified_base 16: mod_base = OTHER; note = adenosine-3'-phosphate
  modified_base 17: mod_base = OTHER; note = guanosine-3'-phosphate
  modified_base 18: mod_base = OTHER; note = cytidine-3'-phosphate
  modified_base 19: mod_base = OTHER; note = adenosine-3'-phosphate
  misc_feature 1..19: note = RNA
  misc_feature 20..21: note = DNA
agcacgagcagggccagcatt

SEQ ID NO: 1079 - DNA, 21 bp, synthetic construct
  source 1..21: mol_type = other DNA
  modified_base 1: mod_base = OTHER; note = cytidine-3'-phosphate
  modified_base 2: mod_base = OTHER; note = guanosine-3'-phosphate
  modified_base 3: mod_base = OTHER; note = cytidine-3'-phosphate
  modified_base 4: mod_base = OTHER; note = cytidine-3'-phosphate
  modified_base 5: mod_base = OTHER; note = guanosine-3'-phosphate
  modified_base 6: mod_base = OTHER; note = adenosine-3'-phosphate
  modified_base 7: mod_base = OTHER; note = adenosine-3'-phosphate
  modified_base 8: mod_base = OTHER; note = guanosine-3'-phosphate
  modified_base 9: mod_base = OTHER; note = cytidine-3'-phosphate
  modified_base 10: mod_base = OTHER; note = cytidine-3'-phosphate
  modified_base 11: mod_base = OTHER; note = adenosine-3'-phosphate
  modified_base 12: mod_base = OTHER; note = guanosine-3'-phosphate
  modified_base 13: mod_base = OTHER; note = cytidine-3'-phosphate
  modified_base 14: mod_base = OTHER; note = adenosine-3'-phosphate
  modified_base 15: mod_base = OTHER; note = cytidine-3'-phosphate
  modified_base 16: mod_base = OTHER; note = guanosine-3'-phosphate
  modified_base 17: mod_base = OTHER; note = adenosine-3'-phosphate
  modified_base 18: mod_base = OTHER; note = guanosine-3'-phosphate
  modified_base 19: mod_base = OTHER; note = cytidine-3'-phosphate
  misc_feature 1..19: note = RNA
  misc_feature 20..21: note = DNA
cgccgaagccagcacgagctt

SEQ ID NO: 1080 - DNA, 21 bp, synthetic construct
  source 1..21: mol_type = other DNA
  modified_base 1: mod_base = OTHER; note = adenosine-3'-phosphate
  modified_base 2: mod_base = OTHER; note = guanosine-3'-phosphate
  modified_base 3: mod_base = OTHER; note = adenosine-3'-phosphate
  modified_base 4: mod_base = OTHER; note = guanosine-3'-phosphate
  modified_base 5: mod_base = OTHER; note = uridine-3'-phosphate
  modified_base 6: mod_base = OTHER; note = adenosine-3'-phosphate
  modified_base 7: mod_base = OTHER; note = guanosine-3'-phosphate
  modified_base 8: mod_base = OTHER; note = cytidine-3'-phosphate
  modified_base 9: mod_base = OTHER; note = adenosine-3'-phosphate
  modified_base 10: mod_base = OTHER; note = cytidine-3'-phosphate
  modified_base 11: mod_base = OTHER; note = cytidine-3'-phosphate
  modified_base 12: mod_base = OTHER; note = cytidine-3'-phosphate
  modified_base 13: mod_base = OTHER; note = cytidine-3'-phosphate
  modified_base 14: mod_base = OTHER; note = cytidine-3'-phosphate
  modified_base 15: mod_base = OTHER; note = guanosine-3'-phosphate
  modified_base 16: mod_base = OTHER; note = cytidine-3'-phosphate
  modified_base 17: mod_base = OTHER; note = cytidine-3'-phosphate
  modified_base 18: mod_base = OTHER; note = guanosine-3'-phosphate
  modified_base 19: mod_base = OTHER; note = adenosine-3'-phosphate
  misc_feature 1..19: note = RNA
  misc_feature 20..21: note = DNA
agagtagcacccccgccgatt

SEQ ID NO: 1081 - DNA, 21 bp, synthetic construct
  source 1..21: mol_type = other DNA
  modified_base 1: mod_base = OTHER; note = cytidine-3'-phosphate
  modified_base 2: mod_base = OTHER; note = adenosine-3'-phosphate
  modified_base 3: mod_base = OTHER; note = guanosine-3'-phosphate
  modified_base 4: mod_base = OTHER; note = adenosine-3'-phosphate
  modified_base 5: mod_base = OTHER; note = guanosine-3'-phosphate
  modified_base 6: mod_base = OTHER; note = uridine-3'-phosphate
  modified_base 7: mod_base = OTHER; note = adenosine-3'-phosphate
  modified_base 8: mod_base = OTHER; note = guanosine-3'-phosphate
  modified_base 9: mod_base = OTHER; note = cytidine-3'-phosphate
  modified_base 10: mod_base = OTHER; note = adenosine-3'-phosphate
  modified_base 11: mod_base = OTHER; note = cytidine-3'-phosphate
  modified_base 12: mod_base = OTHER; note = cytidine-3'-phosphate
  modified_base 13: mod_base = OTHER; note = cytidine-3'-phosphate
  modified_base 14: mod_base = OTHER; note = cytidine-3'-phosphate
  modified_base 15: mod_base = OTHER; note = cytidine-3'-phosphate
  modified_base 16: mod_base = OTHER; note = guanosine-3'-phosphate
  modified_base 17: mod_base = OTHER; note = cytidine-3'-phosphate
  modified_base 18: mod_base = OTHER; note = cytidine-3'-phosphate
  modified_base 19: mod_base = OTHER; note = guanosine-3'-phosphate
  misc_feature 1..19: note = RNA
  misc_feature 20..21: note = DNA
cagagtagcacccccgccgtt

SEQ ID NO: 1082 - DNA, 21 bp, synthetic construct
  source 1..21: mol_type = other DNA
  modified_base 1: mod_base = OTHER; note = cytidine-3'-phosphate
  modified_base 2: mod_base = OTHER; note = cytidine-3'-phosphate
  modified_base 3: mod_base = OTHER; note = adenosine-3'-phosphate
  modified_base 4: mod_base = OTHER; note = guanosine-3'-phosphate
  modified_base 5: mod_base = OTHER; note = adenosine-3'-phosphate
  modified_base 6: mod_base = OTHER; note = guanosine-3'-phosphate
  modified_base 7: mod_base = OTHER; note = uridine-3'-phosphate
  modified_base 8: mod_base = OTHER; note = adenosine-3'-phosphate
  modified_base 9: mod_base = OTHER; note = guanosine-3'-phosphate
  modified_base 10: mod_base = OTHER; note = cytidine-3'-phosphate
  modified_base 11: mod_base = OTHER; note = adenosine-3'-phosphate
  modified_base 12: mod_base = OTHER; note = cytidine-3'-phosphate
  modified_base 13: mod_base = OTHER; note = cytidine-3'-phosphate
  modified_base 14: mod_base = OTHER; note = cytidine-3'-phosphate
  modified_base 15: mod_base = OTHER; note = cytidine-3'-phosphate
  modified_base 16: mod_base = OTHER; note = cytidine-3'-phosphate
  modified_base 17: mod_base = OTHER; note = guanosine-3'-phosphate
  modified_base 18: mod_base = OTHER; note = cytidine-3'-phosphate
  modified_base 19: mod_base = OTHER; note = cytidine-3'-phosphate
  misc_feature 1..19: note = RNA
  misc_feature 20..21: note = DNA
ccagagtagcacccccgcctt

SEQ ID NO: 1083 - DNA, 21 bp, synthetic construct
  source 1..21: mol_type = other DNA
  modified_base 1: mod_base = OTHER; note = adenosine-3'-phosphate
  modified_base 2: mod_base = OTHER; note = cytidine-3'-phosphate
  modified_base 3: mod_base = OTHER; note = cytidine-3'-phosphate
  modified_base 4: mod_base = OTHER; note = adenosine-3'-phosphate
  modified_base 5: mod_base = OTHER; note = guanosine-3'-phosphate
  modified_base 6: mod_base = OTHER; note = adenosine-3'-phosphate
  modified_base 7: mod_base = OTHER; note = guanosine-3'-phosphate
  modified_base 8: mod_base = OTHER; note = uridine-3'-phosphate
  modified_base 9: mod_base = OTHER; note = adenosine-3'-phosphate
  modified_base 10: mod_base = OTHER; note = guanosine-3'-phosphate
  modified_base 11: mod_base = OTHER; note = cytidine-3'-phosphate
  modified_base 12: mod_base = OTHER; note = adenosine-3'-phosphate
  modified_base 13: mod_base = OTHER; note = cytidine-3'-phosphate
  modified_base 14: mod_base = OTHER; note = cytidine-3'-phosphate
  modified_base 15: mod_base = OTHER; note = cytidine-3'-phosphate
  modified_base 16: mod_base = OTHER; note = cytidine-3'-phosphate
  modified_base 17: mod_base = OTHER; note = cytidine-3'-phosphate
  modified_base 18: mod_base = OTHER; note = guanosine-3'-phosphate
  modified_base 19: mod_base = OTHER; note = cytidine-3'-phosphate
  misc_feature 1..19: note = RNA
  misc_feature 20..21: note = DNA
accagagtagcacccccgctt

SEQ ID NO: 1084 - DNA, 21 bp, synthetic construct
  source 1..21: mol_type = other DNA
  modified_base 1: mod_base = OTHER; note = uridine-3'-phosphate
  modified_base 2: mod_base = OTHER; note = adenosine-3'-phosphate
  modified_base 3: mod_base = OTHER; note = cytidine-3'-phosphate
  modified_base 4: mod_base = OTHER; note = cytidine-3'-phosphate
  modified_base 5: mod_base = OTHER; note = adenosine-3'-phosphate
  modified_base 6: mod_base = OTHER; note = guanosine-3'-phosphate
  modified_base 7: mod_base = OTHER; note = adenosine-3'-phosphate
  modified_base 8: mod_base = OTHER; note = guanosine-3'-phosphate
  modified_base 9: mod_base = OTHER; note = uridine-3'-phosphate
  modified_base 10: mod_base = OTHER; note = adenosine-3'-phosphate
  modified_base 11: mod_base = OTHER; note = guanosine-3'-phosphate
  modified_base 12: mod_base = OTHER; note = cytidine-3'-phosphate
  modified_base 13: mod_base = OTHER; note = adenosine-3'-phosphate
  modified_base 14: mod_base = OTHER; note = cytidine-3'-phosphate
  modified_base 15: mod_base = OTHER; note = cytidine-3'-phosphate
  modified_base 16: mod_base = OTHER; note = cytidine-3'-phosphate
  modified_base 17: mod_base = OTHER; note = cytidine-3'-phosphate
  modified_base 18: mod_base = OTHER; note = cytidine-3'-phosphate
  modified_base 19: mod_base = OTHER; note = guanosine-3'-phosphate
  misc_feature 1..19: note = RNA
  misc_feature 20..21: note = DNA
taccagagtagcacccccgtt

SEQ ID NO: 1085 - DNA, 21 bp, synthetic construct
  source 1..21: mol_type = other DNA
  modified_base 1: mod_base = OTHER; note = adenosine-3'-phosphate
  modified_base 2: mod_base = OTHER; note = uridine-3'-phosphate
  modified_base 3: mod_base = OTHER; note = adenosine-3'-phosphate
  modified_base 4: mod_base = OTHER; note = cytidine-3'-phosphate
  modified_base 5: mod_base = OTHER; note = cytidine-3'-phosphate
  modified_base 6: mod_base = OTHER; note = adenosine-3'-phosphate
  modified_base 7: mod_base = OTHER; note = guanosine-3'-phosphate
  modified_base 8: mod_base = OTHER; note = adenosine-3'-phosphate
  modified_base 9: mod_base = OTHER; note = guanosine-3'-phosphate
  modified_base 10: mod_base = OTHER; note = uridine-3'-phosphate
  modified_base 11: mod_base = OTHER; note = adenosine-3'-phosphate
  modified_base 12: mod_base = OTHER; note = guanosine-3'-phosphate
  modified_base 13: mod_base = OTHER; note = cytidine-3'-phosphate
  modified_base 14: mod_base = OTHER; note = adenosine-3'-phosphate
  modified_base 15: mod_base = OTHER; note = cytidine-3'-phosphate
  modified_base 16: mod_base = OTHER; note = cytidine-3'-phosphate
  modified_base 17: mod_base = OTHER; note = cytidine-3'-phosphate
  modified_base 18: mod_base = OTHER; note = cytidine-3'-phosphate
  modified_base 19: mod_base = OTHER; note = cytidine-3'-phosphate
  misc_feature 1..19: note = RNA
  misc_feature 20..21: note = DNA
ataccagagtagcaccccctt

SEQ ID NO: 1086 - DNA, 21 bp, synthetic construct
  source 1..21: mol_type = other DNA
  modified_base 1: mod_base = OTHER; note = adenosine-3'-phosphate
  modified_base 2: mod_base = OTHER; note = adenosine-3'-phosphate
  modified_base 3: mod_base = OTHER; note = adenosine-3'-phosphate
  modified_base 4: mod_base = OTHER; note = uridine-3'-phosphate
  modified_base 5: mod_base = OTHER; note = adenosine-3'-phosphate
  modified_base 6: mod_base = OTHER; note = cytidine-3'-phosphate
  modified_base 7: mod_base = OTHER; note = cytidine-3'-phosphate
  modified_base 8: mod_base = OTHER; note = adenosine-3'-phosphate
  modified_base 9: mod_base = OTHER; note = guanosine-3'-phosphate
  modified_base 10: mod_base = OTHER; note = adenosine-3'-phosphate
  modified_base 11: mod_base = OTHER; note = guanosine-3'-phosphate
  modified_base 12: mod_base = OTHER; note = uridine-3'-phosphate
  modified_base 13: mod_base = OTHER; note = adenosine-3'-phosphate
  modified_base 14: mod_base = OTHER; note = guanosine-3'-phosphate
  modified_base 15: mod_base = OTHER; note = cytidine-3'-phosphate
  modified_base 16: mod_base = OTHER; note = adenosine-3'-phosphate
  modified_base 17: mod_base = OTHER; note = cytidine-3'-phosphate
  modified_base 18: mod_base = OTHER; note = cytidine-3'-phosphate
  modified_base 19: mod_base = OTHER; note = cytidine-3'-phosphate
  misc_feature 1..19: note = RNA
  misc_feature 20..21: note = DNA
aaataccagagtagcaccctt

SEQ ID NO: 1087 - DNA, 21 bp, synthetic construct
  source 1..21: mol_type = other DNA
  modified_base 1: mod_base = OTHER; note = guanosine-3'-phosphate
  modified_base 2: mod_base = OTHER; note = adenosine-3'-phosphate
  modified_base 3: mod_base = OTHER; note = adenosine-3'-phosphate
  modified_base 4: mod_base = OTHER; note = adenosine-3'-phosphate
  modified_base 5: mod_base = OTHER; note = uridine-3'-phosphate
  modified_base 6: mod_base = OTHER; note = adenosine-3'-phosphate
  modified_base 7: mod_base = OTHER; note = cytidine-3'-phosphate
  modified_base 8: mod_base = OTHER; note = cytidine-3'-phosphate
  modified_base 9: mod_base = OTHER; note = adenosine-3'-phosphate
  modified_base 10: mod_base = OTHER; note = guanosine-3'-phosphate
  modified_base 11: mod_base = OTHER; note = adenosine-3'-phosphate
  modified_base 12: mod_base = OTHER; note = guanosine-3'-phosphate
  modified_base 13: mod_base = OTHER; note = uridine-3'-phosphate
  modified_base 14: mod_base = OTHER; note = adenosine-3'-phosphate
  modified_base 15: mod_base = OTHER; note = guanosine-3'-phosphate
  modified_base 16: mod_base = OTHER; note = cytidine-3'-phosphate
  modified_base 17: mod_base = OTHER; note = adenosine-3'-phosphate
  modified_base 18: mod_base = OTHER; note = cytidine-3'-phosphate
  modified_base 19: mod_base = OTHER; note = cytidine-3'-phosphate
  misc_feature 1..19: note = RNA
  misc_feature 20..21: note = DNA
gaaataccagagtagcacctt

SEQ ID NO: 1088 - DNA, 21 bp, synthetic construct
  source 1..21: mol_type = other DNA
  modified_base 1: mod_base = OTHER; note = guanosine-3'-phosphate
  modified_base 2: mod_base = OTHER; note = guanosine-3'-phosphate
  modified_base 3: mod_base = OTHER; note = adenosine-3'-phosphate
  modified_base 4: mod_base = OTHER; note = adenosine-3'-phosphate
  modified_base 5: mod_base = OTHER; note = adenosine-3'-phosphate
  modified_base 6: mod_base = OTHER; note = uridine-3'-phosphate
  modified_base 7: mod_base = OTHER; note = adenosine-3'-phosphate
  modified_base 8: mod_base = OTHER; note = cytidine-3'-phosphate
  modified_base 9: mod_base = OTHER; note = cytidine-3'-phosphate
  modified_base 10: mod_base = OTHER; note = adenosine-3'-phosphate
  modified_base 11: mod_base = OTHER; note = guanosine-3'-phosphate
  modified_base 12: mod_base = OTHER; note = adenosine-3'-phosphate
  modified_base 13: mod_base = OTHER; note = guanosine-3'-phosphate
  modified_base 14: mod_base = OTHER; note = uridine-3'-phosphate
  modified_base 15: mod_base = OTHER; note = adenosine-3'-phosphate
  modified_base 16: mod_base = OTHER; note = guanosine-3'-phosphate
  modified_base 17: mod_base = OTHER; note = cytidine-3'-phosphate
  modified_base 18: mod_base = OTHER; note = adenosine-3'-phosphate
  modified_base 19: mod_base = OTHER; note = cytidine-3'-phosphate
  misc_feature 1..19: note = RNA
  misc_feature 20..21: note = DNA
ggaaataccagagtagcactt

SEQ ID NO: 1089 - DNA, 21 bp, synthetic construct
  source 1..21: mol_type = other DNA
  modified_base 1: mod_base = OTHER; note = uridine-3'-phosphate
  modified_base 2: mod_base = OTHER; note = adenosine-3'-phosphate
  modified_base 3: mod_base = OTHER; note = guanosine-3'-phosphate
  modified_base 4: mod_base = OTHER; note = guanosine-3'-phosphate
  modified_base 5: mod_base = OTHER; note = adenosine-3'-phosphate
  modified_base 6: mod_base = OTHER; note = adenosine-3'-phosphate
  modified_base 7: mod_base = OTHER; note = adenosine-3'-phosphate
  modified_base 8: mod_base = OTHER; note = uridine-3'-phosphate
  modified_base 9: mod_base = OTHER; note = adenosine-3'-phosphate
  modified_base 10: mod_base = OTHER; note = cytidine-3'-phosphate
  modified_base 11: mod_base = OTHER; note = cytidine-3'-phosphate
  modified_base 12: mod_base = OTHER; note = adenosine-3'-phosphate
  modified_base 13: mod_base = OTHER; note = guanosine-3'-phosphate
  modified_base 14: mod_base = OTHER; note = adenosine-3'-phosphate
  modified_base 15: mod_base = OTHER; note = guanosine-3'-phosphate
  modified_base 16: mod_base = OTHER; note = uridine-3'-phosphate
  modified_base 17: mod_base = OTHER; note = adenosine-3'-phosphate
  modified_base 18: mod_base = OTHER; note = guanosine-3'-phosphate
  modified_base 19: mod_base = OTHER; note = cytidine-3'-phosphate
  misc_feature 1..19: note = RNA
  misc_feature 20..21: note = DNA
taggaaataccagagtagctt

SEQ ID NO: 1090 - DNA, 21 bp, synthetic construct
  source 1..21: mol_type = other DNA
  modified_base 1: mod_base = OTHER; note = cytidine-3'-phosphate
  modified_base 2: mod_base = OTHER; note = uridine-3'-phosphate
  modified_base 3: mod_base = OTHER; note = adenosine-3'-phosphate
  modified_base 4: mod_base = OTHER; note = guanosine-3'-phosphate
  modified_base 5: mod_base = OTHER; note = guanosine-3'-phosphate
  modified_base 6: mod_base = OTHER; note = adenosine-3'-phosphate
  modified_base 7: mod_base = OTHER; note = adenosine-3'-phosphate
  modified_base 8: mod_base = OTHER; note = adenosine-3'-phosphate
  modified_base 9: mod_base = OTHER; note = uridine-3'-phosphate
  modified_base 10: mod_base = OTHER; note = adenosine-3'-phosphate
  modified_base 11: mod_base = OTHER; note = cytidine-3'-phosphate
  modified_base 12: mod_base = OTHER; note = cytidine-3'-phosphate
  modified_base 13: mod_base = OTHER; note = adenosine-3'-phosphate
  modified_base 14: mod_base = OTHER; note = guanosine-3'-phosphate
  modified_base 15: mod_base = OTHER; note = adenosine-3'-phosphate
  modified_base 16: mod_base = OTHER; note = guanosine-3'-phosphate
  modified_base 17: mod_base = OTHER; note = uridine-3'-phosphate
  modified_base 18: mod_base = OTHER; note = adenosine-3'-phosphate
  modified_base 19: mod_base = OTHER; note = guanosine-3'-phosphate
  misc_feature 1..19: note = RNA
  misc_feature 20..21: note = DNA
ctaggaaataccagagtagtt

SEQ ID NO: 1091 - DNA, 21 bp, synthetic construct
  source 1..21: mol_type = other DNA
  modified_base 1: mod_base = OTHER; note = cytidine-3'-phosphate
  modified_base 2: mod_base = OTHER; note = cytidine-3'-phosphate
  modified_base 3: mod_base = OTHER; note = uridine-3'-phosphate
  modified_base 4: mod_base = OTHER; note = adenosine-3'-phosphate
  modified_base 5: mod_base = OTHER; note = guanosine-3'-phosphate
  modified_base 6: mod_base = OTHER; note = guanosine-3'-phosphate
  modified_base 7: mod_base = OTHER; note = adenosine-3'-phosphate
  modified_base 8: mod_base = OTHER; note = adenosine-3'-phosphate
  modified_base 9: mod_base = OTHER; note = adenosine-3'-phosphate
  modified_base 10: mod_base = OTHER; note = uridine-3'-phosphate
  modified_base 11: mod_base = OTHER; note = adenosine-3'-phosphate
  modified_base 12: mod_base = OTHER; note = cytidine-3'-phosphate
  modified_base 13: mod_base = OTHER; note = cytidine-3'-phosphate
  modified_base 14: mod_base = OTHER; note = adenosine-3'-phosphate
  modified_base 15: mod_base = OTHER; note = guanosine-3'-phosphate
  modified_base 16: mod_base = OTHER; note = adenosine-3'-phosphate
  modified_base 17: mod_base = OTHER; note = guanosine-3'-phosphate
  modified_base 18: mod_base = OTHER; note = uridine-3'-phosphate
  modified_base 19: mod_base = OTHER; note = adenosine-3'-phosphate
  misc_feature 1..19: note = RNA
  misc_feature 20..21: note = DNA
cctaggaaataccagagtatt

SEQ ID NO: 1092 - DNA, 21 bp, synthetic construct
  source 1..21: mol_type = other DNA
  modified_base 1: mod_base = OTHER; note = cytidine-3'-phosphate
  modified_base 2: mod_base = OTHER; note = cytidine-3'-phosphate
  modified_base 3: mod_base = OTHER; note = cytidine-3'-phosphate
  modified_base 4: mod_base = OTHER; note = uridine-3'-phosphate
  modified_base 5: mod_base = OTHER; note = adenosine-3'-phosphate
  modified_base 6: mod_base = OTHER; note = guanosine-3'-phosphate
  modified_base 7: mod_base = OTHER; note = guanosine-3'-phosphate
  modified_base 8: mod_base = OTHER; note = adenosine-3'-phosphate
  modified_base 9: mod_base = OTHER; note = adenosine-3'-phosphate
  modified_base 10: mod_base = OTHER; note = adenosine-3'-phosphate
  modified_base 11: mod_base = OTHER; note = uridine-3'-phosphate
  modified_base 12: mod_base = OTHER; note = adenosine-3'-phosphate
  modified_base 13: mod_base = OTHER; note = cytidine-3'-phosphate
  modified_base 14: mod_base = OTHER; note = cytidine-3'-phosphate
  modified_base 15: mod_base = OTHER; note = adenosine-3'-phosphate
  modified_base 16: mod_base = OTHER; note = guanosine-3'-phosphate
  modified_base 17: mod_base = OTHER; note = adenosine-3'-phosphate
  modified_base 18: mod_base = OTHER; note = guanosine-3'-phosphate
  modified_base 19: mod_base = OTHER; note = uridine-3'-phosphate
  misc_feature 1..19: note = RNA
  misc_feature 20..21: note = DNA
ccctaggaaataccagagttt

SEQ ID NO: 1093 - DNA, 21 bp, synthetic construct
  source 1..21: mol_type = other DNA
  modified_base 1: mod_base = OTHER; note = adenosine-3'-phosphate
  modified_base 2: mod_base = OTHER; note = cytidine-3'-phosphate
  modified_base 3: mod_base = OTHER; note = cytidine-3'-phosphate
  modified_base 4: mod_base = OTHER; note = cytidine-3'-phosphate
  modified_base 5: mod_base = OTHER; note = uridine-3'-phosphate
  modified_base 6: mod_base = OTHER; note = adenosine-3'-phosphate
  modified_base 7: mod_base = OTHER; note = guanosine-3'-phosphate
  modified_base 8: mod_base = OTHER; note = guanosine-3'-phosphate
  modified_base 9: mod_base = OTHER; note = adenosine-3'-phosphate
  modified_base 10: mod_base = OTHER; note = adenosine-3'-phosphate
  modified_base 11: mod_base = OTHER; note = adenosine-3'-phosphate
  modified_base 12: mod_base = OTHER; note = uridine-3'-phosphate
  modified_base 13: mod_base = OTHER; note = adenosine-3'-phosphate
  modified_base 14: mod_base = OTHER; note = cytidine-3'-phosphate
  modified_base 15: mod_base = OTHER; note = cytidine-3'-phosphate
  modified_base 16: mod_base = OTHER; note = adenosine-3'-phosphate
  modified_base 17: mod_base = OTHER; note = guanosine-3'-phosphate
  modified_base 18: mod_base = OTHER; note = adenosine-3'-phosphate
  modified_base 19: mod_base = OTHER; note = guanosine-3'-phosphate
  misc_feature 1..19: note = RNA
  misc_feature 20..21: note = DNA
accctaggaaataccagagtt

SEQ ID NO: 1094 - DNA, 21 bp, synthetic construct
  source 1..21: mol_type = other DNA
  modified_base 1: mod_base = OTHER; note = guanosine-3'-phosphate
  modified_base 2: mod_base = OTHER; note = uridine-3'-phosphate
  modified_base 3: mod_base = OTHER; note = adenosine-3'-phosphate
  modified_base 4: mod_base = OTHER; note = cytidine-3'-phosphate
  modified_base 5: mod_base = OTHER; note = cytidine-3'-phosphate
  modified_base 6: mod_base = OTHER; note = cytidine-3'-phosphate
  modified_base 7: mod_base = OTHER; note = uridine-3'-phosphate
  modified_base 8: mod_base = OTHER; note = adenosine-3'-phosphate
  modified_base 9: mod_base = OTHER; note = guanosine-3'-phosphate
  modified_base 10: mod_base = OTHER; note = guanosine-3'-phosphate
  modified_base 11: mod_base = OTHER; note = adenosine-3'-phosphate
  modified_base 12: mod_base = OTHER; note = adenosine-3'-phosphate
  modified_base 13: mod_base = OTHER; note = adenosine-3'-phosphate
  modified_base 14: mod_base = OTHER; note = uridine-3'-phosphate
  modified_base 15: mod_base = OTHER; note = adenosine-3'-phosphate
  modified_base 16: mod_base = OTHER; note = cytidine-3'-phosphate
  modified_base 17: mod_base = OTHER; note = cytidine-3'-phosphate
  modified_base 18: mod_base = OTHER; note = adenosine-3'-phosphate
  modified_base 19: mod_base = OTHER; note = guanosine-3'-phosphate
  misc_feature 1..19: note = RNA
  misc_feature 20..21: note = DNA
gtaccctaggaaataccagtt

SEQ ID NO: 1095 - DNA, 21 bp, synthetic construct
  source 1..21: mol_type = other DNA
  modified_base 1: mod_base = OTHER; note = cytidine-3'-phosphate
  modified_base 2: mod_base = OTHER; note = uridine-3'-phosphate
  modified_base 3: mod_base = OTHER; note = uridine-3'-phosphate
  modified_base 4: mod_base = OTHER; note = guanosine-3'-phosphate
  modified_base 5: mod_base = OTHER; note = uridine-3'-phosphate
  modified_base 6: mod_base = OTHER; note = adenosine-3'-phosphate
  modified_base 7: mod_base = OTHER; note = cytidine-3'-phosphate
  modified_base 8: mod_base = OTHER; note = cytidine-3'-phosphate
  modified_base 9: mod_base = OTHER; note = cytidine-3'-phosphate
  modified_base 10: mod_base = OTHER; note = uridine-3'-phosphate
  modified_base 11: mod_base = OTHER; note = adenosine-3'-phosphate
  modified_base 12: mod_base = OTHER; note = guanosine-3'-phosphate
  modified_base 13: mod_base = OTHER; note = guanosine-3'-phosphate
  modified_base 14: mod_base = OTHER; note = adenosine-3'-phosphate
  modified_base 15: mod_base = OTHER; note = adenosine-3'-phosphate
  modified_base 16: mod_base = OTHER; note = adenosine-3'-phosphate
  modified_base 17: mod_base = OTHER; note = uridine-3'-phosphate
  modified_base 18: mod_base = OTHER; note = adenosine-3'-phosphate
  modified_base 19: mod_base = OTHER; note = cytidine-3'-phosphate
  misc_feature 1..19: note = RNA
  misc_feature 20..21: note = DNA
cttgtaccctaggaaatactt

SEQ ID NO: 1096 - DNA, 21 bp, synthetic construct
  source 1..21: mol_type = other DNA
  modified_base 1: mod_base = OTHER; note = cytidine-3'-phosphate
  modified_base 2: mod_base = OTHER; note = cytidine-3'-phosphate
  modified_base 3: mod_base = OTHER; note = uridine-3'-phosphate
  modified_base 4: mod_base = OTHER; note = uridine-3'-phosphate
  modified_base 5: mod_base = OTHER; note = guanosine-3'-phosphate
  modified_base 6: mod_base = OTHER; note = uridine-3'-phosphate
  modified_base 7: mod_base = OTHER; note = adenosine-3'-phosphate
  modified_base 8: mod_base = OTHER; note = cytidine-3'-phosphate
  modified_base 9: mod_base = OTHER; note = cytidine-3'-phosphate
  modified_base 10: mod_base = OTHER; note = cytidine-3'-phosphate
  modified_base 11: mod_base = OTHER; note = uridine-3'-phosphate
  modified_base 12: mod_base = OTHER; note = adenosine-3'-phosphate
  modified_base 13: mod_base = OTHER; note = guanosine-3'-phosphate
  modified_base 14: mod_base = OTHER; note = guanosine-3'-phosphate
  modified_base 15: mod_base = OTHER; note = adenosine-3'-phosphate
  modified_base 16: mod_base = OTHER; note = adenosine-3'-phosphate
  modified_base 17: mod_base = OTHER; note = adenosine-3'-phosphate
  modified_base 18: mod_base = OTHER; note = uridine-3'-phosphate
  modified_base 19: mod_base = OTHER; note = adenosine-3'-phosphate
  misc_feature 1..19: note = RNA
  misc_feature 20..21: note = DNA
ccttgtaccctaggaaatatt

SEQ ID NO: 1097 - DNA, 21 bp, synthetic construct
  source 1..21: mol_type = other DNA
  modified_base 1: mod_base = OTHER; note = guanosine-3'-phosphate
  modified_base 2: mod_base = OTHER; note = cytidine-3'-phosphate
  modified_base 3: mod_base = OTHER; note = cytidine-3'-phosphate
  modified_base 4: mod_base = OTHER; note = uridine-3'-phosphate
  modified_base 5: mod_base = OTHER; note = uridine-3'-phosphate
  modified_base 6: mod_base = OTHER; note = guanosine-3'-phosphate
  modified_base 7: mod_base = OTHER; note = uridine-3'-phosphate
  modified_base 8: mod_base = OTHER; note = adenosine-3'-phosphate
  modified_base 9: mod_base = OTHER; note = cytidine-3'-phosphate
  modified_base 10: mod_base = OTHER; note = cytidine-3'-phosphate
  modified_base 11: mod_base = OTHER; note = cytidine-3'-phosphate
  modified_base 12: mod_base = OTHER; note = uridine-3'-phosphate
  modified_base 13: mod_base = OTHER; note = adenosine-3'-phosphate
  modified_base 14: mod_base = OTHER; note = guanosine-3'-phosphate
  modified_base 15: mod_base = OTHER; note = guanosine-3'-phosphate
  modified_base 16: mod_base = OTHER; note = adenosine-3'-phosphate
  modified_base 17: mod_base = OTHER; note = adenosine-3'-phosphate
  modified_base 18: mod_base = OTHER; note = adenosine-3'-phosphate
  modified_base 19: mod_base = OTHER; note = uridine-3'-phosphate
  misc_feature 1..19: note = RNA
  misc_feature 20..21: note = DNA
gccttgtaccctaggaaattt

SEQ ID NO: 1098 - DNA, 21 bp, synthetic construct
  source 1..21: mol_type = other DNA
  modified_base 1: mod_base = OTHER; note = cytidine-3'-phosphate
  modified_base 2: mod_base = OTHER; note = guanosine-3'-phosphate
  modified_base 3: mod_base = OTHER; note = cytidine-3'-phosphate
  modified_base 4: mod_base = OTHER; note = cytidine-3'-phosphate
  modified_base 5: mod_base = OTHER; note = uridine-3'-phosphate
  modified_base 6: mod_base = OTHER; note = uridine-3'-phosphate
  modified_base 7: mod_base = OTHER; note = guanosine-3'-phosphate
  modified_base 8: mod_base = OTHER; note = uridine-3'-phosphate
  modified_base 9: mod_base = OTHER; note = adenosine-3'-phosphate
  modified_base 10: mod_base = OTHER; note = cytidine-3'-phosphate
  modified_base 11: mod_base = OTHER; note = cytidine-3'-phosphate
  modified_base 12: mod_base = OTHER; note = cytidine-3'-phosphate
  modified_base 13: mod_base = OTHER; note = uridine-3'-phosphate
  modified_base 14: mod_base = OTHER; note = adenosine-3'-phosphate
  modified_base 15: mod_base = OTHER; note = guanosine-3'-phosphate
  modified_base 16: mod_base = OTHER; note = guanosine-3'-phosphate
  modified_base 17: mod_base = OTHER; note = adenosine-3'-phosphate
  modified_base 18: mod_base = OTHER; note = adenosine-3'-phosphate
  modified_base 19: mod_base = OTHER; note = adenosine-3'-phosphate
  misc_feature 1..19: note = RNA
  misc_feature 20..21: note = DNA
cgccttgtaccctaggaaatt

SEQ ID NO: 1099 - DNA, 21 bp, synthetic construct
  source 1..21: mol_type = other DNA
  modified_base 1: mod_base = OTHER; note = cytidine-3'-phosphate
  modified_base 2: mod_base = OTHER; note = cytidine-3'-phosphate
  modified_base 3: mod_base = OTHER; note = guanosine-3'-phosphate
  modified_base 4: mod_base = OTHER; note = cytidine-3'-phosphate
  modified_base 5: mod_base = OTHER; note = cytidine-3'-phosphate
  modified_base 6: mod_base = OTHER; note = uridine-3'-phosphate
  modified_base 7: mod_base = OTHER; note = uridine-3'-phosphate
  modified_base 8: mod_base = OTHER; note = guanosine-3'-phosphate
  modified_base 9: mod_base = OTHER; note = uridine-3'-phosphate
  modified_base 10: mod_base = OTHER; note = adenosine-3'-phosphate
  modified_base 11: mod_base = OTHER; note = cytidine-3'-phosphate
  modified_base 12: mod_base = OTHER; note = cytidine-3'-phosphate
  modified_base 13: mod_base = OTHER; note = cytidine-3'-phosphate
  modified_base 14: mod_base = OTHER; note = uridine-3'-phosphate
  modified_base 15: mod_base = OTHER; note = adenosine-3'-phosphate
  modified_base 16: mod_base = OTHER; note = guanosine-3'-phosphate
  modified_base 17: mod_base = OTHER; note = guanosine-3'-phosphate
  modified_base 18: mod_base = OTHER; note = adenosine-3'-phosphate
  modified_base 19: mod_base = OTHER; note = adenosine-3'-phosphate
  misc_feature 1..19: note = RNA
  misc_feature 20..21: note = DNA
ccgccttgtaccctaggaatt

SEQ ID NO: 1100 - DNA, 21 bp, synthetic construct
  source 1..21: mol_type = other DNA
  modified_base 1: mod_base = OTHER; note = cytidine-3'-phosphate
  modified_base 2: mod_base = OTHER; note = uridine-3'-phosphate
  modified_base 3: mod_base = OTHER; note = cytidine-3'-phosphate
  modified_base 4: mod_base = OTHER; note = cytidine-3'-phosphate
  modified_base 5: mod_base = OTHER; note = guanosine-3'-phosphate
  modified_base 6: mod_base = OTHER; note = cytidine-3'-phosphate
  modified_base 7: mod_base = OTHER; note = cytidine-3'-phosphate
  modified_base 8: mod_base = OTHER; note = uridine-3'-phosphate
  modified_base 9: mod_base = OTHER; note = uridine-3'-phosphate
  modified_base 10: mod_base = OTHER; note = guanosine-3'-phosphate
  modified_base 11: mod_base = OTHER; note = uridine-3'-phosphate
  modified_base 12: mod_base = OTHER; note = adenosine-3'-phosphate
  modified_base 13: mod_base = OTHER; note = cytidine-3'-phosphate
  modified_base 14: mod_base = OTHER; note = cytidine-3'-phosphate
  modified_base 15: mod_base = OTHER; note = cytidine-3'-phosphate
  modified_base 16: mod_base = OTHER; note = uridine-3'-phosphate
  modified_base 17: mod_base = OTHER; note = adenosine-3'-phosphate
  modified_base 18: mod_base = OTHER; note = guanosine-3'-phosphate
  modified_base 19: mod_base = OTHER; note = guanosine-3'-phosphate
  misc_feature 1..19: note = RNA
  misc_feature 20..21: note = DNA
ctccgccttgtaccctaggtt

SEQ ID NO: 1101 - DNA, 21 bp, synthetic construct
  source 1..21: mol_type = other DNA
  modified_base 1: mod_base = OTHER; note = cytidine-3'-phosphate
  modified_base 2: mod_base = OTHER; note = cytidine-3'-phosphate
  modified_base 3: mod_base = OTHER; note = uridine-3'-phosphate
  modified_base 4: mod_base = OTHER; note = cytidine-3'-phosphate
  modified_base 5: mod_base = OTHER; note = cytidine-3'-phosphate
  modified_base 6: mod_base = OTHER; note = guanosine-3'-phosphate
  modified_base 7: mod_base = OTHER; note = cytidine-3'-phosphate
  modified_base 8: mod_base = OTHER; note = cytidine-3'-phosphate
  modified_base 9: mod_base = OTHER; note = uridine-3'-phosphate
  modified_base 10: mod_base = OTHER; note = uridine-3'-phosphate
  modified_base 11: mod_base = OTHER; note = guanosine-3'-phosphate
  modified_base 12: mod_base = OTHER; note = uridine-3'-phosphate
  modified_base 13: mod_base = OTHER; note = adenosine-3'-phosphate
  modified_base 14: mod_base = OTHER; note = cytidine-3'-phosphate
  modified_base 15: mod_base = OTHER; note = cytidine-3'-phosphate
  modified_base 16: mod_base = OTHER; note = cytidine-3'-phosphate
  modified_base 17: mod_base = OTHER; note = uridine-3'-phosphate
  modified_base 18: mod_base = OTHER; note = adenosine-3'-phosphate
  modified_base 19: mod_base = OTHER; note = guanosine-3'-phosphate
  misc_feature 1..19: note = RNA
  misc_feature 20..21: note = DNA
cctccgccttgtaccctagtt

SEQ ID NO: 1102 - DNA, 21 bp, synthetic construct
  source 1..21: mol_type = other DNA
  modified_base 1: mod_base = OTHER; note = adenosine-3'-phosphate
  modified_base 2: mod_base = OTHER; note = cytidine-3'-phosphate
  modified_base 3: mod_base = OTHER; note = cytidine-3'-phosphate
  modified_base 4: mod_base = OTHER; note = uridine-3'-phosphate
  modified_base 5: mod_base = OTHER; note = cytidine-3'-phosphate
  modified_base 6: mod_base = OTHER; note = cytidine-3'-phosphate
  modified_base 7: mod_base = OTHER; note = guanosine-3'-phosphate
  modified_base 8: mod_base = OTHER; note = cytidine-3'-phosphate
  modified_base 9: mod_base = OTHER; note = cytidine-3'-phosphate
  modified_base 10: mod_base = OTHER; note = uridine-3'-phosphate
  modified_base 11: mod_base = OTHER; note = uridine-3'-phosphate
  modified_base 12: mod_base = OTHER; note = guanosine-3'-phosphate
  modified_base 13: mod_base = OTHER; note = uridine-3'-phosphate
  modified_base 14: mod_base = OTHER; note = adenosine-3'-phosphate
  modified_base 15: mod_base = OTHER; note = cytidine-3'-phosphate
  modified_base 16: mod_base = OTHER; note = cytidine-3'-phosphate
  modified_base 17: mod_base = OTHER; note = cytidine-3'-phosphate
  modified_base 18: mod_base = OTHER; note = uridine-3'-phosphate
  modified_base 19: mod_base = OTHER; note = adenosine-3'-phosphate
  misc_feature 1..19: note = RNA
  misc_feature 20..21: note = DNA
acctccgccttgtaccctatt

SEQ ID NO: 1103 - DNA, 21 bp, synthetic construct
  source 1..21: mol_type = other DNA
  modified_base 1: mod_base = OTHER; note = cytidine-3'-phosphate
  modified_base 2: mod_base = OTHER; note = adenosine-3'-phosphate
  modified_base 3: mod_base = OTHER; note = cytidine-3'-phosphate
  modified_base 4: mod_base = OTHER; note = cytidine-3'-phosphate
  modified_base 5: mod_base = OTHER; note = uridine-3'-phosphate
  modified_base 6: mod_base = OTHER; note = cytidine-3'-phosphate
  modified_base 7: mod_base = OTHER; note = cytidine-3'-phosphate
  modified_base 8: mod_base = OTHER; note = guanosine-3'-phosphate
  modified_base 9: mod_base = OTHER; note = cytidine-3'-phosphate
  modified_base 10: mod_base = OTHER; note = cytidine-3'-phosphate
  modified_base 11: mod_base = OTHER; note = uridine-3'-phosphate
  modified_base 12: mod_base = OTHER; note = uridine-3'-phosphate
  modified_base 13: mod_base = OTHER; note = guanosine-3'-phosphate
  modified_base 14: mod_base = OTHER; note = uridine-3'-phosphate
  modified_base 15: mod_base = OTHER; note = adenosine-3'-phosphate
  modified_base 16: mod_base = OTHER; note = cytidine-3'-phosphate
  modified_base 17: mod_base = OTHER; note = cytidine-3'-phosphate
  modified_base 18: mod_base = OTHER; note = cytidine-3'-phosphate
  modified_base 19: mod_base = OTHER; note = uridine-3'-phosphate
  misc_feature 1..19: note = RNA
  misc_feature 20..21: note = DNA
cacctccgccttgtacccttt

SEQ ID NO: 1104 - DNA, 21 bp, synthetic construct
  source 1..21: mol_type = other DNA
  modified_base 1: mod_base = OTHER; note = uridine-3'-phosphate
  modified_base 2: mod_base = OTHER; note = cytidine-3'-phosphate
  modified_base 3: mod_base = OTHER; note = adenosine-3'-phosphate
  modified_base 4: mod_base = OTHER; note = cytidine-3'-phosphate
  modified_base 5: mod_base = OTHER; note = cytidine-3'-phosphate
  modified_base 6: mod_base = OTHER; note = uridine-3'-phosphate
  modified_base 7: mod_base = OTHER; note = cytidine-3'-phosphate
  modified_base 8: mod_base = OTHER; note = cytidine-3'-phosphate
  modified_base 9: mod_base = OTHER; note = guanosine-3'-phosphate
  modified_base 10: mod_base = OTHER; note = cytidine-3'-phosphate
  modified_base 11: mod_base = OTHER; note = cytidine-3'-phosphate
  modified_base 12: mod_base = OTHER; note = uridine-3'-phosphate
  modified_base 13: mod_base = OTHER; note = uridine-3'-phosphate
  modified_base 14: mod_base = OTHER; note = guanosine-3'-phosphate
  modified_base 15: mod_base = OTHER; note = uridine-3'-phosphate
  modified_base 16: mod_base = OTHER; note = adenosine-3'-phosphate
  modified_base 17: mod_base = OTHER; note = cytidine-3'-phosphate
  modified_base 18: mod_base = OTHER; note = cytidine-3'-phosphate
  modified_base 19: mod_base = OTHER; note = cytidine-3'-phosphate
  misc_feature 1..19: note = RNA
  misc_feature 20..21: note = DNA
tcacctccgccttgtaccctt

SEQ ID NO: 1105 - DNA, 21 bp, synthetic construct
  source 1..21: mol_type = other DNA
  modified_base 1: mod_base = OTHER; note = adenosine-3'-phosphate
  modified_base 2: mod_base = OTHER; note = uridine-3'-phosphate
  modified_base 3: mod_base = OTHER; note = cytidine-3'-phosphate
  modified_base 4: mod_base = OTHER; note = adenosine-3'-phosphate
  modified_base 5: mod_base = OTHER; note = cytidine-3'-phosphate
  modified_base 6: mod_base = OTHER; note = cytidine-3'-phosphate
  modified_base 7: mod_base = OTHER; note = uridine-3'-phosphate
  modified_base 8: mod_base = OTHER; note = cytidine-3'-phosphate
  modified_base 9: mod_base = OTHER; note = cytidine-3'-phosphate
  modified_base 10: mod_base = OTHER; note = guanosine-3'-phosphate
  modified_base 11: mod_base = OTHER; note = cytidine-3'-phosphate
  modified_base 12: mod_base = OTHER; note = cytidine-3'-phosphate
  modified_base 13: mod_base = OTHER; note = uridine-3'-phosphate
  modified_base 14: mod_base = OTHER; note = uridine-3'-phosphate
  modified_base 15: mod_base = OTHER; note = guanosine-3'-phosphate
  modified_base 16: mod_base = OTHER; note = uridine-3'-phosphate
  modified_base 17: mod_base = OTHER; note = adenosine-3'-phosphate
  modified_base 18: mod_base = OTHER; note = cytidine-3'-phosphate
  modified_base 19: mod_base = OTHER; note = cytidine-3'-phosphate
  misc_feature 1..19: note = RNA
  misc_feature 20..21: note = DNA
atcacctccgccttgtacctt

SEQ ID NO: 1106 - DNA, 21 bp, synthetic construct
  source 1..21: mol_type = other DNA
  modified_base 1: mod_base = OTHER; note = cytidine-3'-phosphate
  modified_base 2: mod_base = OTHER; note = adenosine-3'-phosphate
  modified_base 3: mod_base = OTHER; note = uridine-3'-phosphate
  modified_base 4: mod_base = OTHER; note = cytidine-3'-phosphate
  modified_base 5: mod_base = OTHER; note = adenosine-3'-phosphate
  modified_base 6: mod_base = OTHER; note = cytidine-3'-phosphate
  modified_base 7: mod_base = OTHER; note = cytidine-3'-phosphate
  modified_base 8: mod_base = OTHER; note = uridine-3'-phosphate
  modified_base 9: mod_base = OTHER; note = cytidine-3'-phosphate
  modified_base 10: mod_base = OTHER; note = cytidine-3'-phosphate
  modified_base 11: mod_base = OTHER; note = guanosine-3'-phosphate
  modified_base 12: mod_base = OTHER; note = cytidine-3'-phosphate
  modified_base 13: mod_base = OTHER; note = cytidine-3'-phosphate
  modified_base 14: mod_base = OTHER; note = uridine-3'-phosphate
  modified_base 15: mod_base = OTHER; note = uridine-3'-phosphate
  modified_base 16: mod_base = OTHER; note = guanosine-3'-phosphate
  modified_base 17: mod_base = OTHER; note = uridine-3'-phosphate
  modified_base 18: mod_base = OTHER; note = adenosine-3'-phosphate
  modified_base 19: mod_base = OTHER; note = cytidine-3'-phosphate
  misc_feature 1..19: note = RNA
  misc_feature 20..21: note = DNA
catcacctccgccttgtactt

SEQ ID NO: 1107 - DNA, 21 bp, synthetic construct
  source 1..21: mol_type = other DNA
  modified_base 1: mod_base = OTHER; note = cytidine-3'-phosphate
  modified_base 2: mod_base = OTHER; note = cytidine-3'-phosphate
  modified_base 3: mod_base = OTHER; note = adenosine-3'-phosphate
  modified_base 4: mod_base = OTHER; note = uridine-3'-phosphate
  modified_base 5: mod_base = OTHER; note = cytidine-3'-phosphate
  modified_base 6: mod_base = OTHER; note = adenosine-3'-phosphate
  modified_base 7: mod_base = OTHER; note = cytidine-3'-phosphate
  modified_base 8: mod_base = OTHER; note = cytidine-3'-phosphate
  modified_base 9: mod_base = OTHER; note = uridine-3'-phosphate
  modified_base 10: mod_base = OTHER; note = cytidine-3'-phosphate
  modified_base 11: mod_base = OTHER; note = cytidine-3'-phosphate
  modified_base 12: mod_base = OTHER; note = guanosine-3'-phosphate
  modified_base 13: mod_base = OTHER; note = cytidine-3'-phosphate
  modified_base 14: mod_base = OTHER; note = cytidine-3'-phosphate
  modified_base 15: mod_base = OTHER; note = uridine-3'-phosphate
  modified_base 16: mod_base = OTHER; note = uridine-3'-phosphate
  modified_base 17: mod_base = OTHER; note = guanosine-3'-phosphate
  modified_base 18: mod_base = OTHER; note = uridine-3'-phosphate
  modified_base 19: mod_base = OTHER; note = adenosine-3'-phosphate
  misc_feature 1..19: note = RNA
  misc_feature 20..21: note = DNA
ccatcacctccgccttgtatt

SEQ ID NO: 1108 - DNA, 21 bp, synthetic construct
  source 1..21: mol_type = other DNA
  modified_base 1: mod_base = OTHER; note = adenosine-3'-phosphate
  modified_base 2: mod_base = OTHER; note = cytidine-3'-phosphate
  modified_base 3: mod_base = OTHER; note = cytidine-3'-phosphate
  modified_base 4: mod_base = OTHER; note = adenosine-3'-phosphate
  modified_base 5: mod_base = OTHER; note = uridine-3'-phosphate
  modified_base 6: mod_base = OTHER; note = cytidine-3'-phosphate
  modified_base 7: mod_base = OTHER; note = adenosine-3'-phosphate
  modified_base 8: mod_base = OTHER; note = cytidine-3'-phosphate
  modified_base 9: mod_base = OTHER; note = cytidine-3'-phosphate
  modified_base 10: mod_base = OTHER; note = uridine-3'-phosphate
  modified_base 11: mod_base = OTHER; note = cytidine-3'-phosphate
  modified_base 12: mod_base = OTHER; note = cytidine-3'-phosphate
  modified_base 13: mod_base = OTHER; note = guanosine-3'-phosphate
  modified_base 14: mod_base = OTHER; note = cytidine-3'-phosphate
  modified_base 15: mod_base = OTHER; note = cytidine-3'-phosphate
  modified_base 16: mod_base = OTHER; note = uridine-3'-phosphate
  modified_base 17: mod_base = OTHER; note = uridine-3'-phosphate
  modified_base 18: mod_base = OTHER; note = guanosine-3'-phosphate
  modified_base 19: mod_base = OTHER; note = uridine-3'-phosphate
  misc_feature 1..19: note = RNA
  misc_feature 20..21: note = DNA
accatcacctccgccttgttt

SEQ ID NO: 1109 - DNA, 21 bp, synthetic construct
  source 1..21: mol_type = other DNA
  modified_base 1: mod_base = OTHER; note = guanosine-3'-phosphate
  modified_base 2: mod_base = OTHER; note = adenosine-3'-phosphate
  modified_base 3: mod_base = OTHER; note = cytidine-3'-phosphate
  modified_base 4: mod_base = OTHER; note = cytidine-3'-phosphate
  modified_base 5: mod_base = OTHER; note = adenosine-3'-phosphate
  modified_base 6: mod_base = OTHER; note = uridine-3'-phosphate
  modified_base 7: mod_base = OTHER; note = cytidine-3'-phosphate
  modified_base 8: mod_base = OTHER; note = adenosine-3'-phosphate
  modified_base 9: mod_base = OTHER; note = cytidine-3'-phosphate
  modified_base 10: mod_base = OTHER; note = cytidine-3'-phosphate
  modified_base 11: mod_base = OTHER; note = uridine-3'-phosphate
  modified_base 12: mod_base = OTHER; note = cytidine-3'-phosphate
  modified_base 13: mod_base = OTHER; note = cytidine-3'-phosphate
  modified_base 14: mod_base = OTHER; note = guanosine-3'-phosphate
  modified_base 15: mod_base = OTHER; note = cytidine-3'-phosphate
  modified_base 16: mod_base = OTHER; note = cytidine-3'-phosphate
  modified_base 17: mod_base = OTHER; note = uridine-3'-phosphate
  modified_base 18: mod_base = OTHER; note = uridine-3'-phosphate
  modified_base 19: mod_base = OTHER; note = guanosine-3'-phosphate
  misc_feature 1..19: note = RNA
  misc_feature 20..21: note = DNA
gaccatcacctccgccttgtt

SEQ ID NO: 1110 - DNA, 21 bp, synthetic construct
  source 1..21: mol_type = other DNA
  modified_base 1: mod_base = OTHER; note = uridine-3'-phosphate
  modified_base 2: mod_base = OTHER; note = guanosine-3'-phosphate
  modified_base 3: mod_base = OTHER; note = adenosine-3'-phosphate
  modified_base 4: mod_base = OTHER; note = cytidine-3'-phosphate
  modified_base 5: mod_base = OTHER; note = cytidine-3'-phosphate
  modified_base 6: mod_base = OTHER; note = adenosine-3'-phosphate
  modified_base 7: mod_base = OTHER; note = uridine-3'-phosphate
  modified_base 8: mod_base = OTHER; note = cytidine-3'-phosphate
  modified_base 9: mod_base = OTHER; note = adenosine-3'-phosphate
  modified_base 10: mod_base = OTHER; note = cytidine-3'-phosphate
  modified_base 11: mod_base = OTHER; note = cytidine-3'-phosphate
  modified_base 12: mod_base = OTHER; note = uridine-3'-phosphate
  modified_base 13: mod_base = OTHER; note = cytidine-3'-phosphate
  modified_base 14: mod_base = OTHER; note = cytidine-3'-phosphate
  modified_base 15: mod_base = OTHER; note = guanosine-3'-phosphate
  modified_base 16: mod_base = OTHER; note = cytidine-3'-phosphate
  modified_base 17: mod_base = OTHER; note = cytidine-3'-phosphate
  modified_base 18: mod_base = OTHER; note = uridine-3'-phosphate
  modified_base 19: mod_base = OTHER; note = uridine-3'-phosphate
  misc_feature 1..19: note = RNA
  misc_feature 20..21: note = DNA
tgaccatcacctccgcctttt

SEQ ID NO: 1111 - DNA, 21 bp, synthetic construct
  source 1..21: mol_type = other DNA
  modified_base 1: mod_base = OTHER; note = cytidine-3'-phosphate
  modified_base 2: mod_base = OTHER; note = uridine-3'-phosphate
  modified_base 3: mod_base = OTHER; note = guanosine-3'-phosphate
  modified_base 4: mod_base = OTHER; note = adenosine-3'-phosphate
  modified_base 5: mod_base = OTHER; note = cytidine-3'-phosphate
  modified_base 6: mod_base = OTHER; note = cytidine-3'-phosphate
  modified_base 7: mod_base = OTHER; note = adenosine-3'-phosphate
  modified_base 8: mod_base = OTHER; note = uridine-3'-phosphate
  modified_base 9: mod_base = OTHER; note = cytidine-3'-phosphate
  modified_base 10: mod_base = OTHER; note = adenosine-3'-phosphate
  modified_base 11: mod_base = OTHER; note = cytidine-3'-phosphate
  modified_base 12: mod_base = OTHER; note = cytidine-3'-phosphate
  modified_base 13: mod_base = OTHER; note = uridine-3'-phosphate
  modified_base 14: mod_base = OTHER; note = cytidine-3'-phosphate
  modified_base 15: mod_base = OTHER; note = cytidine-3'-phosphate
  modified_base 16: mod_base = OTHER; note = guanosine-3'-phosphate
  modified_base 17: mod_base = OTHER; note = cytidine-3'-phosphate
  modified_base 18: mod_base = OTHER; note = cytidine-3'-phosphate
  modified_base 19: mod_base = OTHER; note = uridine-3'-phosphate
  misc_feature 1..19: note = RNA
  misc_feature 20..21: note = DNA
ctgaccatcacctccgccttt

SEQ ID NO: 1112 - DNA, 21 bp, synthetic construct
  source 1..21: mol_type = other DNA
  modified_base 1: mod_base = OTHER; note = uridine-3'-phosphate
  modified_base 2: mod_base = OTHER; note = adenosine-3'-phosphate
  modified_base 3: mod_base = OTHER; note = cytidine-3'-phosphate
  modified_base 4: mod_base = OTHER; note = adenosine-3'-phosphate
  modified_base 5: mod_base = OTHER; note = cytidine-3'-phosphate
  modified_base 6: mod_base = OTHER; note = cytidine-3'-phosphate
  modified_base 7: mod_base = OTHER; note = uridine-3'-phosphate
  modified_base 8: mod_base = OTHER; note = guanosine-3'-phosphate
  modified_base 9: mod_base = OTHER; note = guanosine-3'-phosphate
  modified_base 10: mod_base = OTHER; note = cytidine-3'-phosphate
  modified_base 11: mod_base = OTHER; note = uridine-3'-phosphate
  modified_base 12: mod_base = OTHER; note = guanosine-3'-phosphate
  modified_base 13: mod_base = OTHER; note = adenosine-3'-phosphate
  modified_base 14: mod_base = OTHER; note = cytidine-3'-phosphate
  modified_base 15: mod_base = OTHER; note = cytidine-3'-phosphate
  modified_base 16: mod_base = OTHER; note = adenosine-3'-phosphate
  modified_base 17: mod_base = OTHER; note = uridine-3'-phosphate
  modified_base 18: mod_base = OTHER; note = cytidine-3'-phosphate
  modified_base 19: mod_base = OTHER; note = adenosine-3'-phosphate
  misc_feature 1..19: note = RNA
  misc_feature 20..21: note = DNA
tacacctggctgaccatcatt

SEQ ID NO: 1113 - DNA, 21 bp, synthetic construct
  source 1..21: mol_type = other DNA
  modified_base 1: mod_base = OTHER; note = adenosine-3'-phosphate
  modified_base 2: mod_base = OTHER; note = cytidine-3'-phosphate
  modified_base 3: mod_base = OTHER; note = uridine-3'-phosphate
  modified_base 4: mod_base = OTHER; note = guanosine-3'-phosphate
  modified_base 5: mod_base = OTHER; note = cytidine-3'-phosphate
  modified_base 6: mod_base = OTHER; note = cytidine-3'-phosphate
  modified_base 7: mod_base = OTHER; note = uridine-3'-phosphate
  modified_base 8: mod_base = OTHER; note = guanosine-3'-phosphate
  modified_base 9: mod_base = OTHER; note = adenosine-3'-phosphate
  modified_base 10: mod_base = OTHER; note = guanosine-3'-phosphate
  modified_base 11: mod_base = OTHER; note = uridine-3'-phosphate
  modified_base 12: mod_base = OTHER; note = adenosine-3'-phosphate
  modified_base 13: mod_base = OTHER; note = cytidine-3'-phosphate
  modified_base 14: mod_base = OTHER; note = adenosine-3'-phosphate
  modified_base 15: mod_base = OTHER; note = cytidine-3'-phosphate
  modified_base 16: mod_base = OTHER; note = cytidine-3'-phosphate
  modified_base 17: mod_base = OTHER; note = uridine-3'-phosphate
  modified_base 18: mod_base = OTHER; note = guanosine-3'-phosphate
  modified_base 19: mod_base = OTHER; note = guanosine-3'-phosphate
  misc_feature 1..19: note = RNA
  misc_feature 20..21: note = DNA
actgcctgagtacacctggtt

SEQ ID NO: 1114 - DNA, 21 bp, synthetic construct
  source 1..21: mol_type = other DNA
  modified_base 1: mod_base = OTHER; note = uridine-3'-phosphate
  modified_base 2: mod_base = OTHER; note = uridine-3'-phosphate
  modified_base 3: mod_base = OTHER; note = guanosine-3'-phosphate
  modified_base 4: mod_base = OTHER; note = adenosine-3'-phosphate
  modified_base 5: mod_base = OTHER; note = guanosine-3'-phosphate
  modified_base 6: mod_base = OTHER; note = uridine-3'-phosphate
  modified_base 7: mod_base = OTHER; note = adenosine-3'-phosphate
  modified_base 8: mod_base = OTHER; note = cytidine-3'-phosphate
  modified_base 9: mod_base = OTHER; note = adenosine-3'-phosphate
  modified_base 10: mod_base = OTHER; note = cytidine-3'-phosphate
  modified_base 11: mod_base = OTHER; note = guanosine-3'-phosphate
  modified_base 12: mod_base = OTHER; note = cytidine-3'-phosphate
  modified_base 13: mod_base = OTHER; note = adenosine-3'-phosphate
  modified_base 14: mod_base = OTHER; note = guanosine-3'-phosphate
  modified_base 15: mod_base = OTHER; note = adenosine-3'-phosphate
  modified_base 16: mod_base = OTHER; note = cytidine-3'-phosphate
  modified_base 17: mod_base = OTHER; note = uridine-3'-phosphate
  modified_base 18: mod_base = OTHER; note = guanosine-3'-phosphate
  modified_base 19: mod_base = OTHER; note = cytidine-3'-phosphate
  misc_feature 1..19: note = RNA
  misc_feature 20..21: note = DNA
ttgagtacacgcagactgctt

SEQ ID NO: 1115 - DNA, 21 bp, synthetic construct
  source 1..21: mol_type = other DNA
  modified_base 1: mod_base = OTHER; note = guanosine-3'-phosphate
  modified_base 2: mod_base = OTHER; note = uridine-3'-phosphate
  modified_base 3: mod_base = OTHER; note = guanosine-3'-phosphate
  modified_base 4: mod_base = OTHER; note = guanosine-3'-phosphate
  modified_base 5: mod_base = OTHER; note = cytidine-3'-phosphate
  modified_base 6: mod_base = OTHER; note = guanosine-3'-phosphate
  modified_base 7: mod_base = OTHER; note = adenosine-3'-phosphate
  modified_base 8: mod_base = OTHER; note = uridine-3'-phosphate
  modified_base 9: mod_base = OTHER; note = uridine-3'-phosphate
  modified_base 10: mod_base = OTHER; note = guanosine-3'-phosphate
  modified_base 11: mod_base = OTHER; note = adenosine-3'-phosphate
  modified_base 12: mod_base = OTHER; note = guanosine-3'-phosphate
  modified_base 13: mod_base = OTHER; note = uridine-3'-phosphate
  modified_base 14: mod_base = OTHER; note = adenosine-3'-phosphate
  modified_base 15: mod_base = OTHER; note = cytidine-3'-phosphate
  modified_base 16: mod_base = OTHER; note = adenosine-3'-phosphate
  modified_base 17: mod_base = OTHER; note = cytidine-3'-phosphate
  modified_base 18: mod_base = OTHER; note = guanosine-3'-phosphate
  modified_base 19: mod_base = OTHER; note = cytidine-3'-phosphate
  misc_feature 1..19: note = RNA
  misc_feature 20..21: note = DNA
gtggcgattgagtacacgctt

SEQ ID NO: 1116 - DNA, 21 bp, synthetic construct
  source 1..21: mol_type = other DNA
  modified_base 1: mod_base = OTHER; note = adenosine-3'-phosphate
  modified_base 2: mod_base = OTHER; note = uridine-3'-phosphate
  modified_base 3: mod_base = OTHER; note = cytidine-3'-phosphate
  modified_base 4: mod_base = OTHER; note = cytidine-3'-phosphate
  modified_base 5: mod_base = OTHER; note = uridine-3'-phosphate
  modified_base 6: mod_base = OTHER; note = guanosine-3'-phosphate
  modified_base 7: mod_base = OTHER; note = guanosine-3'-phosphate
  modified_base 8: mod_base = OTHER; note = guanosine-3'-phosphate
  modified_base 9: mod_base = OTHER; note = adenosine-3'-phosphate
  modified_base 10: mod_base = OTHER; note = guanosine-3'-phosphate
  modified_base 11: mod_base = OTHER; note = adenosine-3'-phosphate
  modified_base 12: mod_base = OTHER; note = adenosine-3'-phosphate
  modified_base 13: mod_base = OTHER; note = guanosine-3'-phosphate
  modified_base 14: mod_base = OTHER; note = uridine-3'-phosphate
  modified_base 15: mod_base = OTHER; note = guanosine-3'-phosphate
  modified_base 16: mod_base = OTHER; note = guanosine-3'-phosphate
  modified_base 17: mod_base = OTHER; note = cytidine-3'-phosphate
  modified_base 18: mod_base = OTHER; note = guanosine-3'-phosphate
  modified_base 19: mod_base = OTHER; note = adenosine-3'-phosphate
  misc_feature 1..19: note = RNA
  misc_feature 20..21: note = DNA
atcctgggagaagtggcgatt

SEQ ID NO: 1117 - DNA, 21 bp, synthetic construct
  source 1..21: mol_type = other DNA
  modified_base 1: mod_base = OTHER; note = guanosine-3'-phosphate
  modified_base 2: mod_base = OTHER; note = cytidine-3'-phosphate
  modified_base 3: mod_base = OTHER; note = guanosine-3'-phosphate
  modified_base 4: mod_base = OTHER; note = guanosine-3'-phosphate
  modified_base 5: mod_base = OTHER; note = guanosine-3'-phosphate
  modified_base 6: mod_base = OTHER; note = uridine-3'-phosphate
  modified_base 7: mod_base = OTHER; note = adenosine-3'-phosphate
  modified_base 8: mod_base = OTHER; note = adenosine-3'-phosphate
  modified_base 9: mod_base = OTHER; note = guanosine-3'-phosphate
  modified_base 10: mod_base = OTHER; note = adenosine-3'-phosphate
  modified_base 11: mod_base = OTHER; note = uridine-3'-phosphate
  modified_base 12: mod_base = OTHER; note = cytidine-3'-phosphate
  modified_base 13: mod_base = OTHER; note = cytidine-3'-phosphate
  modified_base 14: mod_base = OTHER; note = uridine-3'-phosphate
  modified_base 15: mod_base = OTHER; note = guanosine-3'-phosphate
  modified_base 16: mod_base = OTHER; note = guanosine-3'-phosphate
  modified_base 17: mod_base = OTHER; note = guanosine-3'-phosphate
  modified_base 18: mod_base = OTHER; note = adenosine-3'-phosphate
  modified_base 19: mod_base = OTHER; note = guanosine-3'-phosphate
  misc_feature 1..19: note = RNA
  misc_feature 20..21: note = DNA
gcgggtaagatcctgggagtt

SEQ ID NO: 1118 - DNA, 21 bp, synthetic construct
  source 1..21: mol_type = other DNA
  modified_base 1: mod_base = OTHER; note = adenosine-3'-phosphate
  modified_base 2: mod_base = OTHER; note = cytidine-3'-phosphate
  modified_base 3: mod_base = OTHER; note = uridine-3'-phosphate
  modified_base 4: mod_base = OTHER; note = adenosine-3'-phosphate
  modified_base 5: mod_base = OTHER; note = guanosine-3'-phosphate
  modified_base 6: mod_base = OTHER; note = adenosine-3'-phosphate
  modified_base 7: mod_base = OTHER; note = uridine-3'-phosphate
  modified_base 8: mod_base = OTHER; note = uridine-3'-phosphate
  modified_base 9: mod_base = OTHER; note = cytidine-3'-phosphate
  modified_base 10: mod_base = OTHER; note = cytidine-3'-phosphate
  modified_base 11: mod_base = OTHER; note = cytidine-3'-phosphate
  modified_base 12: mod_base = OTHER; note = guanosine-3'-phosphate
  modified_base 13: mod_base = OTHER; note = guanosine-3'-phosphate
  modified_base 14: mod_base = OTHER; note = cytidine-3'-phosphate
  modified_base 15: mod_base = OTHER; note = guanosine-3'-phosphate
  modified_base 16: mod_base = OTHER; note = guanosine-3'-phosphate
  modified_base 17: mod_base = OTHER; note = guanosine-3'-phosphate
  modified_base 18: mod_base = OTHER; note = uridine-3'-phosphate
  modified_base 19: mod_base = OTHER; note = adenosine-3'-phosphate
  misc_feature 1..19: note = RNA
  misc_feature 20..21: note = DNA
actagattcccggcgggtatt

SEQ ID NO: 1119 - DNA, 21 bp, synthetic construct
  source 1..21: mol_type = other DNA
  modified_base 1: mod_base = OTHER; note = guanosine-3'-phosphate
  modified_base 2: mod_base = OTHER; note = adenosine-3'-phosphate
  modified_base 3: mod_base = OTHER; note = adenosine-3'-phosphate
  modified_base 4: mod_base = OTHER; note = guanosine-3'-phosphate
  modified_base 5: mod_base = OTHER; note = guanosine-3'-phosphate
  modified_base 6: mod_base = OTHER; note = cytidine-3'-phosphate
  modified_base 7: mod_base = OTHER; note = adenosine-3'-phosphate
  modified_base 8: mod_base = OTHER; note = cytidine-3'-phosphate
  modified_base 9: mod_base = OTHER; note = uridine-3'-phosphate
  modified_base 10: mod_base = OTHER; note = adenosine-3'-phosphate
  modified_base 11: mod_base = OTHER; note = guanosine-3'-phosphate
  modified_base 12: mod_base = OTHER; note = adenosine-3'-phosphate
  modified_base 13: mod_base = OTHER; note = uridine-3'-phosphate
  modified_base 14: mod_base = OTHER; note = uridine-3'-phosphate
  modified_base 15: mod_base = OTHER; note = cytidine-3'-phosphate
  modified_base 16: mod_base = OTHER; note = cytidine-3'-phosphate
  modified_base 17: mod_base = OTHER; note = cytidine-3'-phosphate
  modified_base 18: mod_base = OTHER; note = guanosine-3'-phosphate
  modified_base 19: mod_base = OTHER; note = guanosine-3'-phosphate
  misc_feature 1..19: note = RNA
  misc_feature 20..21: note = DNA
gaaggcactagattcccggtt

SEQ ID NO: 1120 - DNA, 21 bp, synthetic construct
  source 1..21: mol_type = other DNA
  modified_base 1: mod_base = OTHER; note = uridine-3'-phosphate
  modified_base 2: mod_base = OTHER; note = uridine-3'-phosphate
  modified_base 3: mod_base = OTHER; note = uridine-3'-phosphate
  modified_base 4: mod_base = OTHER; note = cytidine-3'-phosphate
  modified_base 5: mod_base = OTHER; note = adenosine-3'-phosphate
  modified_base 6: mod_base = OTHER; note = cytidine-3'-phosphate
  modified_base 7: mod_base = OTHER; note = uridine-3'-phosphate
  modified_base 8: mod_base = OTHER; note = guanosine-3'-phosphate
  modified_base 9: mod_base = OTHER; note = cytidine-3'-phosphate
  modified_base 10: mod_base = OTHER; note = guanosine-3'-phosphate
  modified_base 11: mod_base = OTHER; note = guanosine-3'-phosphate
  modified_base 12: mod_base = OTHER; note = adenosine-3'-phosphate
  modified_base 13: mod_base = OTHER; note = adenosine-3'-phosphate
  modified_base 14: mod_base = OTHER; note = guanosine-3'-phosphate
  modified_base 15: mod_base = OTHER; note = guanosine-3'-phosphate
  modified_base 16: mod_base = OTHER; note = cytidine-3'-phosphate
  modified_base 17: mod_base = OTHER; note = adenosine-3'-phosphate
  modified_base 18: mod_base = OTHER; note = cytidine-3'-phosphate
  modified_base 19: mod_base = OTHER; note = uridine-3'-phosphate
  misc_feature 1..19: note = RNA
  misc_feature 20..21: note = DNA
tttcactgcggaaggcacttt

SEQ ID NO: 1121 - DNA, 21 bp, synthetic construct
  source 1..21: mol_type = other DNA
  modified_base 1: mod_base = OTHER; note = uridine-3'-phosphate
  modified_base 2: mod_base = OTHER; note = guanosine-3'-phosphate
  modified_base 3: mod_base = OTHER; note = guanosine-3'-phosphate
  modified_base 4: mod_base = OTHER; note = guanosine-3'-phosphate
  modified_base 5: mod_base = OTHER; note = cytidine-3'-phosphate
  modified_base 6: mod_base = OTHER; note = uridine-3'-phosphate
  modified_base 7: mod_base = OTHER; note = uridine-3'-phosphate
  modified_base 8: mod_base = OTHER; note = uridine-3'-phosphate
  modified_base 9: mod_base = OTHER; note = guanosine-3'-phosphate
  modified_base 10: mod_base = OTHER; note = guanosine-3'-phosphate
  modified_base 11: mod_base = OTHER; note = cytidine-3'-phosphate
  modified_base 12: mod_base = OTHER; note = guanosine-3'-phosphate
  modified_base 13: mod_base = OTHER; note = guanosine-3'-phosphate
  modified_base 14: mod_base = OTHER; note = uridine-3'-phosphate
  modified_base 15: mod_base = OTHER; note = uridine-3'-phosphate
  modified_base 16: mod_base = OTHER; note = uridine-3'-phosphate
  modified_base 17: mod_base = OTHER; note = cytidine-3'-phosphate
  modified_base 18: mod_base = OTHER; note = adenosine-3'-phosphate
  modified_base 19: mod_base = OTHER; note = cytidine-3'-phosphate
  misc_feature 1..19: note = RNA
  misc_feature 20..21: note = DNA
tgggctttggcggtttcactt

SEQ ID NO: 1122 - DNA, 21 bp, synthetic construct
  source 1..21: mol_type = other DNA
  modified_base 1: mod_base = OTHER; note = cytidine-3'-phosphate
  modified_base 2: mod_base = OTHER; note = adenosine-3'-phosphate
  modified_base 3: mod_base = OTHER; note = uridine-3'-phosphate
  modified_base 4: mod_base = OTHER; note = cytidine-3'-phosphate
  modified_base 5: mod_base = OTHER; note = uridine-3'-phosphate
  modified_base 6: mod_base = OTHER; note = uridine-3'-phosphate
  modified_base 7: mod_base = OTHER; note = cytidine-3'-phosphate
  modified_base 8: mod_base = OTHER; note = uridine-3'-phosphate
  modified_base 9: mod_base = OTHER; note = guanosine-3'-phosphate
  modified_base 10: mod_base = OTHER; note = guanosine-3'-phosphate
  modified_base 11: mod_base = OTHER; note = guanosine-3'-phosphate
  modified_base 12: mod_base = OTHER; note = cytidine-3'-phosphate
  modified_base 13: mod_base = OTHER; note = uridine-3'-phosphate
  modified_base 14: mod_base = OTHER; note = uridine-3'-phosphate
  modified_base 15: mod_base = OTHER; note = uridine-3'-phosphate
  modified_base 16: mod_base = OTHER; note = guanosine-3'-phosphate
  modified_base 17: mod_base = OTHER; note = guanosine-3'-phosphate
  modified_base 18: mod_base = OTHER; note = cytidine-3'-phosphate
  modified_base 19: mod_base = OTHER; note = guanosine-3'-phosphate
  misc_feature 1..19: note = RNA
  misc_feature 20..21: note = DNA
catcttctgggctttggcgtt

SEQ ID NO: 1123 - DNA, 21 bp, synthetic construct
  source 1..21: mol_type = other DNA
  modified_base 1: mod_base = OTHER; note = guanosine-3'-phosphate
  modified_base 2: mod_base = OTHER; note = cytidine-3'-phosphate
  modified_base 3: mod_base = OTHER; note = uridine-3'-phosphate
  modified_base 4: mod_base = OTHER; note = cytidine-3'-phosphate
  modified_base 5: mod_base = OTHER; note = cytidine-3'-phosphate
  modified_base 6: mod_base = OTHER; note = uridine-3'-phosphate
  modified_base 7: mod_base = OTHER; note = uridine-3'-phosphate
  modified_base 8: mod_base = OTHER; note = guanosine-3'-phosphate
  modified_base 9: mod_base = OTHER; note = adenosine-3'-phosphate
  modified_base 10: mod_base = OTHER; note = guanosine-3'-phosphate
  modified_base 11: mod_base = OTHER; note = cytidine-3'-phosphate
  modified_base 12: mod_base = OTHER; note = adenosine-3'-phosphate
  modified_base 13: mod_base = OTHER; note = uridine-3'-phosphate
  modified_base 14: mod_base = OTHER; note = cytidine-3'-phosphate
  modified_base 15: mod_base = OTHER; note = uridine-3'-phosphate
  modified_base 16: mod_base = OTHER; note = uridine-3'-phosphate
  modified_base 17: mod_base = OTHER; note = cytidine-3'-phosphate
  modified_base 18: mod_base = OTHER; note = uridine-3'-phosphate
  modified_base 19: mod_base = OTHER; note = guanosine-3'-phosphate
  misc_feature 1..19: note = RNA
  misc_feature 20..21: note = DNA
gctccttgagcatcttctgtt

SEQ ID NO: 1124 - DNA, 21 bp, synthetic construct
  source 1..21: mol_type = other DNA
  modified_base 1: mod_base = OTHER; note = cytidine-3'-phosphate
  modified_base 2: mod_base = OTHER; note = uridine-3'-phosphate
  modified_base 3: mod_base = OTHER; note = guanosine-3'-phosphate
  modified_base 4: mod_base = OTHER; note = guanosine-3'-phosphate
  modified_base 5: mod_base = OTHER; note = uridine-3'-phosphate
  modified_base 6: mod_base = OTHER; note = guanosine-3'-phosphate
  modified_base 7: mod_base = OTHER; note = adenosine-3'-phosphate
  modified_base 8: mod_base = OTHER; note = uridine-3'-phosphate
  modified_base 9: mod_base = OTHER; note = guanosine-3'-phosphate
  modified_base 10: mod_base = OTHER; note = adenosine-3'-phosphate
  modified_base 11: mod_base = OTHER; note = guanosine-3'-phosphate
  modified_base 12: mod_base = OTHER; note = cytidine-3'-phosphate
  modified_base 13: mod_base = OTHER; note = uridine-3'-phosphate
  modified_base 14: mod_base = OTHER; note = cytidine-3'-phosphate
  modified_base 15: mod_base = OTHER; note = cytidine-3'-phosphate
  modified_base 16: mod_base = OTHER; note = uridine-3'-phosphate
  modified_base 17: mod_base = OTHER; note = uridine-3'-phosphate
  modified_base 18: mod_base = OTHER; note = guanosine-3'-phosphate
  modified_base 19: mod_base = OTHER; note = adenosine-3'-phosphate
  misc_feature 1..19: note = RNA
  misc_feature 20..21: note = DNA
ctggtgatgagctccttgatt

SEQ ID NO: 1125 - DNA, 21 bp, synthetic construct
  source 1..21: mol_type = other DNA
  modified_base 1: mod_base = OTHER; note = uridine-3'-phosphate
  modified_base 2: mod_base = OTHER; note = uridine-3'-phosphate
  modified_base 3: mod_base = OTHER; note = cytidine-3'-phosphate
  modified_base 4: mod_base = OTHER; note = cytidine-3'-phosphate
  modified_base 5: mod_base = OTHER; note = cytidine-3'-phosphate
  modified_base 6: mod_base = OTHER; note = adenosine-3'-phosphate
  modified_base 7: mod_base = OTHER; note = guanosine-3'-phosphate
  modified_base 8: mod_base = OTHER; note = guanosine-3'-phosphate
  modified_base 9: mod_base = OTHER; note = cytidine-3'-phosphate
  modified_base 10: mod_base = OTHER; note = guanosine-3'-phosphate
  modified_base 11: mod_base = OTHER; note = guanosine-3'-phosphate
  modified_base 12: mod_base = OTHER; note = guanosine-3'-phosphate
  modified_base 13: mod_base = OTHER; note = uridine-3'-phosphate
  modified_base 14: mod_base = OTHER; note = guanosine-3'-phosphate
  modified_base 15: mod_base = OTHER; note = cytidine-3'-phosphate
  modified_base 16: mod_base = OTHER; note = uridine-3'-phosphate
  modified_base 17: mod_base = OTHER; note = guanosine-3'-phosphate
  modified_base 18: mod_base = OTHER; note = guanosine-3'-phosphate
  modified_base 19: mod_base = OTHER; note = uridine-3'-phosphate
  misc_feature 1..19: note = RNA
  misc_feature 20..21: note = DNA
ttcccaggcgggtgctggttt

SEQ ID NO: 1126 - DNA, 21 bp, synthetic construct
  source 1..21: mol_type = other DNA
  modified_base 1: mod_base = OTHER; note = uridine-3'-phosphate
  modified_base 2: mod_base = OTHER; note = uridine-3'-phosphate
  modified_base 3: mod_base = OTHER; note = guanosine-3'-phosphate
  modified_base 4: mod_base = OTHER; note = uridine-3'-phosphate
  modified_base 5: mod_base = OTHER; note = adenosine-3'-phosphate
  modified_base 6: mod_base = OTHER; note = guanosine-3'-phosphate
  modified_base 7: mod_base = OTHER; note = uridine-3'-phosphate
  modified_base 8: mod_base = OTHER; note = adenosine-3'-phosphate
  modified_base 9: mod_base = OTHER; note = adenosine-3'-phosphate
  modified_base 10: mod_base = OTHER; note = guanosine-3'-phosphate
  modified_base 11: mod_base = OTHER; note = uridine-3'-phosphate
  modified_base 12: mod_base = OTHER; note = uridine-3'-phosphate
  modified_base 13: mod_base = OTHER; note = cytidine-3'-phosphate
  modified_base 14: mod_base = OTHER; note = cytidine-3'-phosphate
  modified_base 15: mod_base = OTHER; note = cytidine-3'-phosphate
  modified_base 16: mod_base = OTHER; note = adenosine-3'-phosphate
  modified_base 17: mod_base = OTHER; note = guanosine-3'-phosphate
  modified_base 18: mod_base = OTHER; note = guanosine-3'-phosphate
  modified_base 19: mod_base = OTHER; note = cytidine-3'-phosphate
  misc_feature 1..19: note = RNA
  misc_feature 20..21: note = DNA
ttgtagtaagttcccaggctt

SEQ ID NO: 1127 - DNA, 21 bp, synthetic construct
  source 1..21: mol_type = other DNA
  modified_base 1: mod_base = OTHER; note = cytidine-3'-phosphate
  modified_base 2: mod_base = OTHER; note = uridine-3'-phosphate
  modified_base 3: mod_base = OTHER; note = guanosine-3'-phosphate
  modified_base 4: mod_base = OTHER; note = guanosine-3'-phosphate
  modified_base 5: mod_base = OTHER; note = adenosine-3'-phosphate
  modified_base 6: mod_base = OTHER; note = guanosine-3'-phosphate
  modified_base 7: mod_base = OTHER; note = uridine-3'-phosphate
  modified_base 8: mod_base = OTHER; note = uridine-3'-phosphate
  modified_base 9: mod_base = OTHER; note = guanosine-3'-phosphate
  modified_base 10: mod_base = OTHER; note = uridine-3'-phosphate
  modified_base 11: mod_base = OTHER; note = adenosine-3'-phosphate
  modified_base 12: mod_base = OTHER; note = guanosine-3'-phosphate
  modified_base 13: mod_base = OTHER; note = uridine-3'-phosphate
  modified_base 14: mod_base = OTHER; note = adenosine-3'-phosphate
  modified_base 15: mod_base = OTHER; note = adenosine-3'-phosphate
  modified_base 16: mod_base = OTHER; note = guanosine-3'-phosphate
  modified_base 17: mod_base = OTHER; note = uridine-3'-phosphate
  modified_base 18: mod_base = OTHER; note = uridine-3'-phosphate
  modified_base 19: mod_base = OTHER; note = cytidine-3'-phosphate
  misc_feature 1..19: note = RNA
  misc_feature 20..21: note = DNA
ctggagttgtagtaagttctt

SEQ ID NO: 1128 - DNA, 21 bp, synthetic construct
  source 1..21: mol_type = other DNA
  modified_base 1: mod_base = OTHER; note = adenosine-3'-phosphate
  modified_base 2: mod_base = OTHER; note = adenosine-3'-phosphate
  modified_base 3: mod_base = OTHER; note = uridine-3'-phosphate
  modified_base 4: mod_base = OTHER; note = adenosine-3'-phosphate
  modified_base 5: mod_base = OTHER; note = guanosine-3'-phosphate
  modified_base 6: mod_base = OTHER; note = adenosine-3'-phosphate
  modified_base 7: mod_base = OTHER; note = cytidine-3'-phosphate
  modified_base 8: mod_base = OTHER; note = guanosine-3'-phosphate
  modified_base 9: mod_base = OTHER; note = guanosine-3'-phosphate
  modified_base 10: mod_base = OTHER; note = adenosine-3'-phosphate
  modified_base 11: mod_base = OTHER; note = guanosine-3'-phosphate
  modified_base 12: mod_base = OTHER; note = cytidine-3'-phosphate
  modified_base 13: mod_base = OTHER; note = uridine-3'-phosphate
  modified_base 14: mod_base = OTHER; note = guanosine-3'-phosphate
  modified_base 15: mod_base = OTHER; note = guanosine-3'-phosphate
  modified_base 16: mod_base = OTHER; note = adenosine-3'-phosphate
  modified_base 17: mod_base = OTHER; note = guanosine-3'-phosphate
  modified_base 18: mod_base = OTHER; note = uridine-3'-phosphate
  modified_base 19: mod_base = OTHER; note = uridine-3'-phosphate
  misc_feature 1..19: note = RNA
  misc_feature 20..21: note = DNA
aatagacggagctggagtttt

SEQ ID NO: 1129 - DNA, 21 bp, synthetic construct
  source 1..21: mol_type = other DNA
  modified_base 1: mod_base = OTHER; note = uridine-3'-phosphate
  modified_base 2: mod_base = OTHER; note = cytidine-3'-phosphate
  modified_base 3: mod_base = OTHER; note = cytidine-3'-phosphate
  modified_base 4: mod_base = OTHER; note = cytidine-3'-phosphate
  modified_base 5: mod_base = OTHER; note = cytidine-3'-phosphate
  modified_base 6: mod_base = OTHER; note = adenosine-3'-phosphate
  modified_base 7: mod_base = OTHER; note = adenosine-3'-phosphate
  modified_base 8: mod_base = OTHER; note = adenosine-3'-phosphate
  modified_base 9: mod_base = OTHER; note = guanosine-3'-phosphate
  modified_base 10: mod_base = OTHER; note = guanosine-3'-phosphate
  modified_base 11: mod_base = OTHER; note = adenosine-3'-phosphate
  modified_base 12: mod_base = OTHER; note = adenosine-3'-phosphate
  modified_base 13: mod_base = OTHER; note = uridine-3'-phosphate
  modified_base 14: mod_base = OTHER; note = adenosine-3'-phosphate
  modified_base 15: mod_base = OTHER; note = guanosine-3'-phosphate
  modified_base 16: mod_base = OTHER; note = adenosine-3'-phosphate
  modified_base 17: mod_base = OTHER; note = cytidine-3'-phosphate
  modified_base 18: mod_base = OTHER; note = guanosine-3'-phosphate
  modified_base 19: mod_base = OTHER; note = guanosine-3'-phosphate
  misc_feature 1..19: note = RNA
  misc_feature 20..21: note = DNA
tccccaaaggaatagacggtt

SEQ ID NO: 1130 - DNA, 21 bp, synthetic construct
  source 1..21: mol_type = other DNA
  modified_base 1: mod_base = OTHER; note = guanosine-3'-phosphate
  modified_base 2: mod_base = OTHER; note = uridine-3'-phosphate
  modified_base 3: mod_base = OTHER; note = guanosine-3'-phosphate
  modified_base 4: mod_base = OTHER; note = adenosine-3'-phosphate
  modified_base 5: mod_base = OTHER; note = guanosine-3'-phosphate
  modified_base 6: mod_base = OTHER; note = guanosine-3'-phosphate
  modified_base 7: mod_base = OTHER; note = guanosine-3'-phosphate
  modified_base 8: mod_base = OTHER; note = guanosine-3'-phosphate
  modified_base 9: mod_base = OTHER; note = uridine-3'-phosphate
  modified_base 10: mod_base = OTHER; note = cytidine-3'-phosphate
  modified_base 11: mod_base = OTHER; note = cytidine-3'-phosphate
  modified_base 12: mod_base = OTHER; note = cytidine-3'-phosphate
  modified_base 13: mod_base = OTHER; note = uridine-3'-phosphate
  modified_base 14: mod_base = OTHER; note = cytidine-3'-phosphate
  modified_base 15: mod_base = OTHER; note = cytidine-3'-phosphate
  modified_base 16: mod_base = OTHER; note = cytidine-3'-phosphate
  modified_base 17: mod_base = OTHER; note = cytidine-3'-phosphate
  modified_base 18: mod_base = OTHER; note = adenosine-3'-phosphate
  modified_base 19: mod_base = OTHER; note = adenosine-3'-phosphate
  misc_feature 1..19: note = RNA
  misc_feature 20..21: note = DNA
gtgaggggtccctccccaatt

SEQ ID NO: 1131 - DNA, 21 bp, synthetic construct
  source 1..21: mol_type = other DNA
  modified_base 1: mod_base = OTHER; note = adenosine-3'-phosphate
  modified_base 2: mod_base = OTHER; note = guanosine-3'-phosphate
  modified_base 3: mod_base = OTHER; note = adenosine-3'-phosphate
  modified_base 4: mod_base = OTHER; note = adenosine-3'-phosphate
  modified_base 5: mod_base = OTHER; note = guanosine-3'-phosphate
  modified_base 6: mod_base = OTHER; note = adenosine-3'-phosphate
  modified_base 7: mod_base = OTHER; note = adenosine-3'-phosphate
  modified_base 8: mod_base = OTHER; note = guanosine-3'-phosphate
  modified_base 9: mod_base = OTHER; note = cytidine-3'-phosphate
  modified_base 10: mod_base = OTHER; note = adenosine-3'-phosphate
  modified_base 11: mod_base = OTHER; note = guanosine-3'-phosphate
  modified_base 12: mod_base = OTHER; note = guanosine-3'-phosphate
  modified_base 13: mod_base = OTHER; note = uridine-3'-phosphate
  modified_base 14: mod_base = OTHER; note = guanosine-3'-phosphate
  modified_base 15: mod_base = OTHER; note = adenosine-3'-phosphate
  modified_base 16: mod_base = OTHER; note = guanosine-3'-phosphate
  modified_base 17: mod_base = OTHER; note = guanosine-3'-phosphate
  modified_base 18: mod_base = OTHER; note = guanosine-3'-phosphate
  modified_base 19: mod_base = OTHER; note = guanosine-3'-phosphate
  misc_feature 1..19: note = RNA
  misc_feature 20..21: note = DNA
agaagaagcaggtgaggggtt

SEQ ID NO: 1132 - DNA, 21 bp, synthetic construct
  source 1..21: mol_type = other DNA
  modified_base 1: mod_base = OTHER; note = adenosine-3'-phosphate
  modified_base 2: mod_base = OTHER; note = adenosine-3'-phosphate
  modified_base 3: mod_base = OTHER; note = uridine-3'-phosphate
  modified_base 4: mod_base = OTHER; note = guanosine-3'-phosphate
  modified_base 5: mod_base = OTHER; note = adenosine-3'-phosphate
  modified_base 6: mod_base = OTHER; note = adenosine-3'-phosphate
  modified_base 7: mod_base = OTHER; note = cytidine-3'-phosphate
  modified_base 8: mod_base = OTHER; note = cytidine-3'-phosphate
  modified_base 9: mod_base = OTHER; note = adenosine-3'-phosphate
  modified_base 10: mod_base = OTHER; note = guanosine-3'-phosphate
  modified_base 11: mod_base = OTHER; note = adenosine-3'-phosphate
  modified_base 12: mod_base = OTHER; note = adenosine-3'-phosphate
  modified_base 13: mod_base = OTHER; note = guanosine-3'-phosphate
  modified_base 14: mod_base = OTHER; note = adenosine-3'-phosphate
  modified_base 15: mod_base = OTHER; note = adenosine-3'-phosphate
  modified_base 16: mod_base = OTHER; note = guanosine-3'-phosphate
  modified_base 17: mod_base = OTHER; note = cytidine-3'-phosphate
  modified_base 18: mod_base = OTHER; note = adenosine-3'-phosphate
  modified_base 19: mod_base = OTHER; note = guanosine-3'-phosphate
  misc_feature 1..19: note = RNA
  misc_feature 20..21: note = DNA
aatgaaccagaagaagcagtt

SEQ ID NO: 1133 - DNA, 21 bp, synthetic construct
  source 1..21: mol_type = other DNA
  modified_base 1: mod_base = OTHER; note = guanosine-3'-phosphate
  modified_base 2: mod_base = OTHER; note = adenosine-3'-phosphate
  modified_base 3: mod_base = OTHER; note = uridine-3'-phosphate
  modified_base 4: mod_base = OTHER; note = uridine-3'-phosphate
  modified_base 5: mod_base = OTHER; note = uridine-3'-phosphate
  modified_base 6: mod_base = OTHER; note = guanosine-3'-phosphate
  modified_base 7: mod_base = OTHER; note = guanosine-3'-phosphate
  modified_base 8: mod_base = OTHER; note = adenosine-3'-phosphate
  modified_base 9: mod_base = OTHER; note = guanosine-3'-phosphate
  modified_base 10: mod_base = OTHER; note = adenosine-3'-phosphate
  modified_base 11: mod_base = OTHER; note = adenosine-3'-phosphate
  modified_base 12: mod_base = OTHER; note = uridine-3'-phosphate
  modified_base 13: mod_base = OTHER; note = guanosine-3'-phosphate
  modified_base 14: mod_base = OTHER; note = adenosine-3'-phosphate
  modified_base 15: mod_base = OTHER; note = adenosine-3'-phosphate
  modified_base 16: mod_base = OTHER; note = cytidine-3'-phosphate
  modified_base 17: mod_base = OTHER; note = cytidine-3'-phosphate
  modified_base 18: mod_base = OTHER; note = adenosine-3'-phosphate
  modified_base 19: mod_base = OTHER; note = guanosine-3'-phosphate
  misc_feature 1..19: note = RNA
  misc_feature 20..21: note = DNA
gatttggagaatgaaccagtt

SEQ ID NO: 1134 - DNA, 21 bp, synthetic construct
  source 1..21: mol_type = other DNA
  modified_base 1: mod_base = OTHER; note = guanosine-3'-phosphate
  modified_base 2: mod_base = OTHER; note = uridine-3'-phosphate
  modified_base 3: mod_base = OTHER; note = guanosine-3'-phosphate
  modified_base 4: mod_base = OTHER; note = cytidine-3'-phosphate
  modified_base 5: mod_base = OTHER; note = uridine-3'-phosphate
  modified_base 6: mod_base = OTHER; note = cytidine-3'-phosphate
  modified_base 7: mod_base = OTHER; note = guanosine-3'-phosphate
  modified_base 8: mod_base = OTHER; note = guanosine-3'-phosphate
  modified_base 9: mod_base = OTHER; note = guanosine-3'-phosphate
  modified_base 10: mod_base = OTHER; note = guanosine-3'-phosphate
  modified_base 11: mod_base = OTHER; note = adenosine-3'-phosphate
  modified_base 12: mod_base = OTHER; note = uridine-3'-phosphate
  modified_base 13: mod_base = OTHER; note = uridine-3'-phosphate
  modified_base 14: mod_base = OTHER; note = uridine-3'-phosphate
  modified_base 15: mod_base = OTHER; note = guanosine-3'-phosphate
  modified_base 16: mod_base = OTHER; note = guanosine-3'-phosphate
  modified_base 17: mod_base = OTHER; note = adenosine-3'-phosphate
  modified_base 18: mod_base = OTHER; note = guanosine-3'-phosphate
  modified_base 19: mod_base = OTHER; note = adenosine-3'-phosphate
  misc_feature 1..19: note = RNA
  misc_feature 20..21: note = DNA
gtgctcggggatttggagatt

SEQ ID NO: 1135 - DNA, 21 bp, synthetic construct
  source 1..21: mol_type = other DNA
  modified_base 1: mod_base = OTHER; note = adenosine-3'-phosphate
  modified_base 2: mod_base = OTHER; note = uridine-3'-phosphate
  modified_base 3: mod_base = OTHER; note = cytidine-3'-phosphate
  modified_base 4: mod_base = OTHER; note = adenosine-3'-phosphate
  modified_base 5: mod_base = OTHER; note = guanosine-3'-phosphate
  modified_base 6: mod_base = OTHER; note = cytidine-3'-phosphate
  modified_base 7: mod_base = OTHER; note = cytidine-3'-phosphate
  modified_base 8: mod_base = OTHER; note = guanosine-3'-phosphate
  modified_base 9: mod_base = OTHER; note = guanosine-3'-phosphate
  modified_base 10: mod_base = OTHER; note = cytidine-3'-phosphate
  modified_base 11: mod_base = OTHER; note = guanosine-3'-phosphate
  modified_base 12: mod_base = OTHER; note = guanosine-3'-phosphate
  modified_base 13: mod_base = OTHER; note = uridine-3'-phosphate
  modified_base 14: mod_base = OTHER; note = guanosine-3'-phosphate
  modified_base 15: mod_base = OTHER; note = cytidine-3'-phosphate
  modified_base 16: mod_base = OTHER; note = uridine-3'-phosphate
  modified_base 17: mod_base = OTHER; note = cytidine-3'-phosphate
  modified_base 18: mod_base = OTHER; note = guanosine-3'-phosphate
  modified_base 19: mod_base = OTHER; note = guanosine-3'-phosphate
  misc_feature 1..19: note = RNA
  misc_feature 20..21: note = DNA
atcagccggcggtgctcggtt

SEQ ID NO: 1136 - DNA, 21 bp, synthetic construct
  source 1..21: mol_type = other DNA
  modified_base 1: mod_base = OTHER; note = uridine-3'-phosphate
  modified_base 2: mod_base = OTHER; note = cytidine-3'-phosphate
  modified_base 3: mod_base = OTHER; note = guanosine-3'-phosphate
  modified_base 4: mod_base = OTHER; note = guanosine-3'-phosphate
  modified_base 5: mod_base = OTHER; note = guanosine-3'-phosphate
  modified_base 6: mod_base = OTHER; note = guanosine-3'-phosphate
  modified_base 7: mod_base = OTHER; note = cytidine-3'-phosphate
  modified_base 8: mod_base = OTHER; note = uridine-3'-phosphate
  modified_base 9: mod_base = OTHER; note = cytidine-3'-phosphate
  modified_base 10: mod_base = OTHER; note = adenosine-3'-phosphate
  modified_base 11: mod_base = OTHER; note = guanosine-3'-phosphate
  modified_base 12: mod_base = OTHER; note = cytidine-3'-phosphate
  modified_base 13: mod_base = OTHER; note = adenosine-3'-phosphate
  modified_base 14: mod_base = OTHER; note = uridine-3'-phosphate
  modified_base 15: mod_base = OTHER; note = cytidine-3'-phosphate
  modified_base 16: mod_base = OTHER; note = adenosine-3'-phosphate
  modified_base 17: mod_base = OTHER; note = guanosine-3'-phosphate
  modified_base 18: mod_base = OTHER; note = cytidine-3'-phosphate
  modified_base 19: mod_base = OTHER; note = cytidine-3'-phosphate
  misc_feature 1..19: note = RNA
  misc_feature 20..21: note = DNA
tcggggctcagcatcagcctt

SEQ ID NO: 1137 - DNA, 21 bp, synthetic construct
  source 1..21: mol_type = other DNA
  modified_base 1: mod_base = OTHER; note = uridine-3'-phosphate
  modified_base 2: mod_base = OTHER; note = guanosine-3'-phosphate
  modified_base 3: mod_base = OTHER; note = cytidine-3'-phosphate
  modified_base 4: mod_base = OTHER; note = adenosine-3'-phosphate
  modified_base 5: mod_base = OTHER; note = cytidine-3'-phosphate
  modified_base 6: mod_base = OTHER; note = cytidine-3'-phosphate
  modified_base 7: mod_base = OTHER; note = adenosine-3'-phosphate
  modified_base 8: mod_base = OTHER; note = cytidine-3'-phosphate
  modified_base 9: mod_base = OTHER; note = cytidine-3'-phosphate
  modified_base 10: mod_base = OTHER; note = uridine-3'-phosphate
  modified_base 11: mod_base = OTHER; note = cytidine-3'-phosphate
  modified_base 12: mod_base = OTHER; note = guanosine-3'-phosphate
  modified_base 13: mod_base = OTHER; note = guanosine-3'-phosphate
  modified_base 14: mod_base = OTHER; note = guanosine-3'-phosphate
  modified_base 15: mod_base = OTHER; note = guanosine-3'-phosphate
  modified_base 16: mod_base = OTHER; note = cytidine-3'-phosphate
  modified_base 17: mod_base = OTHER; note = uridine-3'-phosphate
  modified_base 18: mod_base = OTHER; note = cytidine-3'-phosphate
  modified_base 19: mod_base = OTHER; note = adenosine-3'-phosphate
  misc_feature 1..19: note = RNA
  misc_feature 20..21: note = DNA
tgcaccacctcggggctcatt

SEQ ID NO: 1138 - DNA, 21 bp, synthetic construct
  source 1..21: mol_type = other DNA
  modified_base 1: mod_base = OTHER; note = adenosine-3'-phosphate
  modified_base 2: mod_base = OTHER; note = cytidine-3'-phosphate
  modified_base 3: mod_base = OTHER; note = cytidine-3'-phosphate
  modified_base 4: mod_base = OTHER; note = adenosine-3'-phosphate
  modified_base 5: mod_base = OTHER; note = guanosine-3'-phosphate
  modified_base 6: mod_base = OTHER; note = cytidine-3'-phosphate
  modified_base 7: mod_base = OTHER; note = adenosine-3'-phosphate
  modified_base 8: mod_base = OTHER; note = guanosine-3'-phosphate
  modified_base 9: mod_base = OTHER; note = uridine-3'-phosphate
  modified_base 10: mod_base = OTHER; note = guanosine-3'-phosphate
  modified_base 11: mod_base = OTHER; note = cytidine-3'-phosphate
  modified_base 12: mod_base = OTHER; note = cytidine-3'-phosphate
  modified_base 13: mod_base = OTHER; note = uridine-3'-phosphate
  modified_base 14: mod_base = OTHER; note = guanosine-3'-phosphate
  modified_base 15: mod_base = OTHER; note = cytidine-3'-phosphate
  modified_base 16: mod_base = OTHER; note = adenosine-3'-phosphate
  modified_base 17: mod_base = OTHER; note = cytidine-3'-phosphate
  modified_base 18: mod_base = OTHER; note = cytidine-3'-phosphate
  modified_base 19: mod_base = OTHER; note = adenosine-3'-phosphate
  misc_feature 1..19: note = RNA
  misc_feature 20..21: note = DNA
accagcagtgcctgcaccatt

SEQ ID NO: 1139 - DNA, 21 bp, synthetic construct
  source 1..21: mol_type = other DNA
  modified_base 1: mod_base = OTHER; note = uridine-3'-phosphate
  modified_base 2: mod_base = OTHER; note = cytidine-3'-phosphate
  modified_base 3: mod_base = OTHER; note = cytidine-3'-phosphate
  modified_base 4: mod_base = OTHER; note = uridine-3'-phosphate
  modified_base 5: mod_base = OTHER; note = cytidine-3'-phosphate
  modified_base 6: mod_base = OTHER; note = cytidine-3'-phosphate
  modified_base 7: mod_base = OTHER; note = adenosine-3'-phosphate
  modified_base 8: mod_base = OTHER; note = cytidine-3'-phosphate
  modified_base 9: mod_base = OTHER; note = cytidine-3'-phosphate
  modified_base 10: mod_base = OTHER; note = adenosine-3'-phosphate
  modified_base 11: mod_base = OTHER; note = guanosine-3'-phosphate
  modified_base 12: mod_base = OTHER; note = cytidine-3'-phosphate
  modified_base 13: mod_base = OTHER; note = adenosine-3'-phosphate
  modified_base 14: mod_base = OTHER; note = guanosine-3'-phosphate
  modified_base 15: mod_base = OTHER; note = uridine-3'-phosphate
  modified_base 16: mod_base = OTHER; note = guanosine-3'-phosphate
  modified_base 17: mod_base = OTHER; note = cytidine-3'-phosphate
  modified_base 18: mod_base = OTHER; note = cytidine-3'-phosphate
  modified_base 19: mod_base = OTHER; note = uridine-3'-phosphate
  misc_feature 1..19: note = RNA
  misc_feature 20..21: note = DNA
tcctccaccagcagtgccttt

SEQ ID NO: 1140 - DNA, 21 bp, synthetic construct
  source 1..21: mol_type = other DNA
  modified_base 1: mod_base = OTHER; note = uridine-3'-phosphate
  modified_base 2: mod_base = OTHER; note = guanosine-3'-phosphate
  modified_base 3: mod_base = OTHER; note = guanosine-3'-phosphate
  modified_base 4: mod_base = OTHER; note = adenosine-3'-phosphate
  modified_base 5: mod_base = OTHER; note = cytidine-3'-phosphate
  modified_base 6: mod_base = OTHER; note = adenosine-3'-phosphate
  modified_base 7: mod_base = OTHER; note = guanosine-3'-phosphate
  modified_base 8: mod_base = OTHER; note = cytidine-3'-phosphate
  modified_base 9: mod_base = OTHER; note = adenosine-3'-phosphate
  modified_base 10: mod_base = OTHER; note = guanosine-3'-phosphate
  modified_base 11: mod_base = OTHER; note = cytidine-3'-phosphate
  modified_base 12: mod_base = OTHER; note = uridine-3'-phosphate
  modified_base 13: mod_base = OTHER; note = cytidine-3'-phosphate
  modified_base 14: mod_base = OTHER; note = cytidine-3'-phosphate
  modified_base 15: mod_base = OTHER; note = uridine-3'-phosphate
  modified_base 16: mod_base = OTHER; note = cytidine-3'-phosphate
  modified_base 17: mod_base = OTHER; note = cytidine-3'-phosphate
  modified_base 18: mod_base = OTHER; note = adenosine-3'-phosphate
  modified_base 19: mod_base = OTHER; note = cytidine-3'-phosphate
  misc_feature 1..19: note = RNA
  misc_feature 20..21: note = DNA
tggacagcagctcctccactt

SEQ ID NO: 1141 - DNA, 21 bp, synthetic construct
  source 1..21: mol_type = other DNA
  modified_base 1: mod_base = OTHER; note = guanosine-3'-phosphate
  modified_base 2: mod_base = OTHER; note = adenosine-3'-phosphate
  modified_base 3: mod_base = OTHER; note = guanosine-3'-phosphate
  modified_base 4: mod_base = OTHER; note = cytidine-3'-phosphate
  modified_base 5: mod_base = OTHER; note = uridine-3'-phosphate
  modified_base 6: mod_base = OTHER; note = guanosine-3'-phosphate
  modified_base 7: mod_base = OTHER; note = uridine-3'-phosphate
  modified_base 8: mod_base = OTHER; note = uridine-3'-phosphate
  modified_base 9: mod_base = OTHER; note = guanosine-3'-phosphate
  modified_base 10: mod_base = OTHER; note = adenosine-3'-phosphate
  modified_base 11: mod_base = OTHER; note = cytidine-3'-phosphate
  modified_base 12: mod_base = OTHER; note = uridine-3'-phosphate
  modified_base 13: mod_base = OTHER; note = guanosine-3'-phosphate
  modified_base 14: mod_base = OTHER; note = uridine-3'-phosphate
  modified_base 15: mod_base = OTHER; note = guanosine-3'-phosphate
  modified_base 16: mod_base = OTHER; note = guanosine-3'-phosphate
  modified_base 17: mod_base = OTHER; note = adenosine-3'-phosphate
  modified_base 18: mod_base = OTHER; note = cytidine-3'-phosphate
  modified_base 19: mod_base = OTHER; note = adenosine-3'-phosphate
  misc_feature 1..19: note = RNA
  misc_feature 20..21: note = DNA
gagctgttgactgtggacatt

SEQ ID NO: 1142 - DNA, 21 bp, synthetic construct
  source 1..21: mol_type = other DNA
  modified_base 1: mod_base = OTHER; note = adenosine-3'-phosphate
  modified_base 2: mod_base = OTHER; note = cytidine-3'-phosphate
  modified_base 3: mod_base = OTHER; note = guanosine-3'-phosphate
  modified_base 4: mod_base = OTHER; note = guanosine-3'-phosphate
  modified_base 5: mod_base = OTHER; note = cytidine-3'-phosphate
  modified_base 6: mod_base = OTHER; note = adenosine-3'-phosphate
  modified_base 7: mod_base = OTHER; note = guanosine-3'-phosphate
  modified_base 8: mod_base = OTHER; note = cytidine-3'-phosphate
  modified_base 9: mod_base = OTHER; note = cytidine-3'-phosphate
  modified_base 10: mod_base = OTHER; note = guanosine-3'-phosphate
  modified_base 11: mod_base = OTHER; note = adenosine-3'-phosphate
  modified_base 12: mod_base = OTHER; note = guanosine-3'-phosphate
  modified_base 13: mod_base = OTHER; note = cytidine-3'-phosphate
  modified_base 14: mod_base = OTHER; note = uridine-3'-phosphate
  modified_base 15: mod_base = OTHER; note = guanosine-3'-phosphate
  modified_base 16: mod_base = OTHER; note = uridine-3'-phosphate
  modified_base 17: mod_base = OTHER; note = uridine-3'-phosphate
  modified_base 18: mod_base = OTHER; note = guanosine-3'-phosphate
  modified_base 19: mod_base = OTHER; note = adenosine-3'-phosphate
  misc_feature 1..19: note = RNA
  misc_feature 20..21: note = DNA
acggcagccgagctgttgatt

SEQ ID NO: 1143 - DNA, 21 bp, synthetic construct
  source 1..21: mol_type = other DNA
  modified_base 1: mod_base = OTHER; note = uridine-3'-phosphate
  modified_base 2: mod_base = OTHER; note = guanosine-3'-phosphate
  modified_base 3: mod_base = OTHER; note = uridine-3'-phosphate
  modified_base 4: mod_base = OTHER; note = adenosine-3'-phosphate
  modified_base 5: mod_base = OTHER; note = guanosine-3'-phosphate
  modified_base 6: mod_base = OTHER; note = guanosine-3'-phosphate
  modified_base 7: mod_base = OTHER; note = guanosine-3'-phosphate
  modified_base 8: mod_base = OTHER; note = guanosine-3'-phosphate
  modified_base 9: mod_base = OTHER; note = adenosine-3'-phosphate
  modified_base 10: mod_base = OTHER; note = cytidine-3'-phosphate
  modified_base 11: mod_base = OTHER; note = guanosine-3'-phosphate
  modified_base 12: mod_base = OTHER; note = guanosine-3'-phosphate
  modified_base 13: mod_base = OTHER; note = cytidine-3'-phosphate
  modified_base 14: mod_base = OTHER; note = adenosine-3'-phosphate
  modified_base 15: mod_base = OTHER; note = guanosine-3'-phosphate
  modified_base 16: mod_base = OTHER; note = cytidine-3'-phosphate
  modified_base 17: mod_base = OTHER; note = cytidine-3'-phosphate
  modified_base 18: mod_base = OTHER; note = guanosine-3'-phosphate
  modified_base 19: mod_base = OTHER; note = adenosine-3'-phosphate
  misc_feature 1..19: note = RNA
  misc_feature 20..21: note = DNA
tgtaggggacggcagccgatt

SEQ ID NO: 1144 - DNA, 21 bp, synthetic construct
  source 1..21: mol_type = other DNA
  modified_base 1: mod_base = OTHER; note = uridine-3'-phosphate
  modified_base 2: mod_base = OTHER; note = adenosine-3'-phosphate
  modified_base 3: mod_base = OTHER; note = guanosine-3'-phosphate
  modified_base 4: mod_base = OTHER; note = guanosine-3'-phosphate
  modified_base 5: mod_base = OTHER; note = cytidine-3'-phosphate
  modified_base 6: mod_base = OTHER; note = cytidine-3'-phosphate
  modified_base 7: mod_base = OTHER; note = cytidine-3'-phosphate
  modified_base 8: mod_base = OTHER; note = uridine-3'-phosphate
  modified_base 9: mod_base = OTHER; note = cytidine-3'-phosphate
  modified_base 10: mod_base = OTHER; note = guanosine-3'-phosphate
  modified_base 11: mod_base = OTHER; note = guanosine-3'-phosphate
  modified_base 12: mod_base = OTHER; note = guanosine-3'-phosphate
  modified_base 13: mod_base = OTHER; note = guanosine-3'-phosphate
  modified_base 14: mod_base = OTHER; note = uridine-3'-phosphate
  modified_base 15: mod_base = OTHER; note = cytidine-3'-phosphate
  modified_base 16: mod_base = OTHER; note = cytidine-3'-phosphate
  modified_base 17: mod_base = OTHER; note = adenosine-3'-phosphate
  modified_base 18: mod_base = OTHER; note = cytidine-3'-phosphate
  modified_base 19: mod_base = OTHER; note = uridine-3'-phosphate
  misc_feature 1..19: note = RNA
  misc_feature 20..21: note = DNA
taggccctcggggtccacttt

SEQ ID NO: 1145 - DNA, 21 bp, synthetic construct
  source 1..21: mol_type = other DNA
  modified_base 1: mod_base = OTHER; note = uridine-3'-phosphate
  modified_base 2: mod_base = OTHER; note = cytidine-3'-phosphate
  modified_base 3: mod_base = OTHER; note = cytidine-3'-phosphate
  modified_base 4: mod_base = OTHER; note = adenosine-3'-phosphate
  modified_base 5: mod_base = OTHER; note = guanosine-3'-phosphate
  modified_base 6: mod_base = OTHER; note = guanosine-3'-phosphate
  modified_base 7: mod_base = OTHER; note = adenosine-3'-phosphate
  modified_base 8: mod_base = OTHER; note = uridine-3'-phosphate
  modified_base 9: mod_base = OTHER; note = cytidine-3'-phosphate
  modified_base 10: mod_base = OTHER; note = adenosine-3'-phosphate
  modified_base 11: mod_base = OTHER; note = cytidine-3'-phosphate
  modified_base 12: mod_base = OTHER; note = uridine-3'-phosphate
  modified_base 13: mod_base = OTHER; note = adenosine-3'-phosphate
  modified_base 14: mod_base = OTHER; note = guanosine-3'-phosphate
  modified_base 15: mod_base = OTHER; note = guanosine-3'-phosphate
  modified_base 16: mod_base = OTHER; note = cytidine-3'-phosphate
  modified_base 17: mod_base = OTHER; note = cytidine-3'-phosphate
  modified_base 18: mod_base = OTHER; note = cytidine-3'-phosphate
  modified_base 19: mod_base = OTHER; note = uridine-3'-phosphate
  misc_feature 1..19: note = RNA
  misc_feature 20..21: note = DNA
tccaggatcactaggcccttt

SEQ ID NO: 1146 - DNA, 21 bp, synthetic construct
  source 1..21: mol_type = other DNA
  modified_base 1: mod_base = OTHER; note = cytidine-3'-phosphate
  modified_base 2: mod_base = OTHER; note = uridine-3'-phosphate
  modified_base 3: mod_base = OTHER; note = guanosine-3'-phosphate
  modified_base 4: mod_base = OTHER; note = guanosine-3'-phosphate
  modified_base 5: mod_base = OTHER; note = cytidine-3'-phosphate
  modified_base 6: mod_base = OTHER; note = uridine-3'-phosphate
  modified_base 7: mod_base = OTHER; note = uridine-3'-phosphate
  modified_base 8: mod_base = OTHER; note = cytidine-3'-phosphate
  modified_base 9: mod_base = OTHER; note = cytidine-3'-phosphate
  modified_base 10: mod_base = OTHER; note = adenosine-3'-phosphate
  modified_base 11: mod_base = OTHER; note = guanosine-3'-phosphate
  modified_base 12: mod_base = OTHER; note = guanosine-3'-phosphate
  modified_base 13: mod_base = OTHER; note = adenosine-3'-phosphate
  modified_base 14: mod_base = OTHER; note = uridine-3'-phosphate
  modified_base 15: mod_base = OTHER; note = cytidine-3'-phosphate
  modified_base 16: mod_base = OTHER; note = adenosine-3'-phosphate
  modified_base 17: mod_base = OTHER; note = cytidine-3'-phosphate
  modified_base 18: mod_base = OTHER; note = uridine-3'-phosphate
  modified_base 19: mod_base = OTHER; note = adenosine-3'-phosphate
  misc_feature 1..19: note = RNA
  misc_feature 20..21: note = DNA
ctggcttccaggatcactatt

SEQ ID NO: 1147 - DNA, 21 bp, synthetic construct
  source 1..21: mol_type = other DNA
  modified_base 1: mod_base = OTHER; note = adenosine-3'-phosphate
  modified_base 2: mod_base = OTHER; note = uridine-3'-phosphate
  modified_base 3: mod_base = OTHER; note = guanosine-3'-phosphate
  modified_base 4: mod_base = OTHER; note = uridine-3'-phosphate
  modified_base 5: mod_base = OTHER; note = cytidine-3'-phosphate
  modified_base 6: mod_base = OTHER; note = uridine-3'-phosphate
  modified_base 7: mod_base = OTHER; note = uridine-3'-phosphate
  modified_base 8: mod_base = OTHER; note = uridine-3'-phosphate
  modified_base 9: mod_base = OTHER; note = cytidine-3'-phosphate
  modified_base 10: mod_base = OTHER; note = adenosine-3'-phosphate
  modified_base 11: mod_base = OTHER; note = cytidine-3'-phosphate
  modified_base 12: mod_base = OTHER; note = adenosine-3'-phosphate
  modified_base 13: mod_base = OTHER; note = cytidine-3'-phosphate
  modified_base 14: mod_base = OTHER; note = uridine-3'-phosphate
  modified_base 15: mod_base = OTHER; note = guanosine-3'-phosphate
  modified_base 16: mod_base = OTHER; note = guanosine-3'-phosphate
  modified_base 17: mod_base = OTHER; note = cytidine-3'-phosphate
  modified_base 18: mod_base = OTHER; note = uridine-3'-phosphate
  modified_base 19: mod_base = OTHER; note = uridine-3'-phosphate
  misc_feature 1..19: note = RNA
  misc_feature 20..21: note = DNA
atgtctttcacactggctttt

SEQ ID NO: 1148 - DNA, 21 bp, synthetic construct
  source 1..21: mol_type = other DNA
  modified_base 1: mod_base = OTHER; note = adenosine-3'-phosphate
  modified_base 2: mod_base = OTHER; note = adenosine-3'-phosphate
  modified_base 3: mod_base = OTHER; note = uridine-3'-phosphate
  modified_base 4: mod_base = OTHER; note = guanosine-3'-phosphate
  modified_base 5: mod_base = OTHER; note = cytidine-3'-phosphate
  modified_base 6: mod_base = OTHER; note = adenosine-3'-phosphate
  modified_base 7: mod_base = OTHER; note = guanosine-3'-phosphate
  modified_base 8: mod_base = OTHER; note = cytidine-3'-phosphate
  modified_base 9: mod_base = OTHER; note = uridine-3'-phosphate
  modified_base 10: mod_base = OTHER; note = adenosine-3'-phosphate
  modified_base 11: mod_base = OTHER; note = uridine-3'-phosphate
  modified_base 12: mod_base = OTHER; note = guanosine-3'-phosphate
  modified_base 13: mod_base = OTHER; note = uridine-3'-phosphate
  modified_base 14: mod_base = OTHER; note = cytidine-3'-phosphate
  modified_base 15: mod_base = OTHER; note = uridine-3'-phosphate
  modified_base 16: mod_base = OTHER; note = uridine-3'-phosphate
  modified_base 17: mod_base = OTHER; note = uridine-3'-phosphate
  modified_base 18: mod_base = OTHER; note = cytidine-3'-phosphate
  modified_base 19: mod_base = OTHER; note = adenosine-3'-phosphate
  misc_feature 1..19: note = RNA
  misc_feature 20..21: note = DNA
aatgcagctatgtctttcatt

SEQ ID NO: 1149 - DNA, 21 bp, synthetic construct
  source 1..21: mol_type = other DNA
  modified_base 1: mod_base = OTHER; note = cytidine-3'-phosphate
  modified_base 2: mod_base = OTHER; note = adenosine-3'-phosphate
  modified_base 3: mod_base = OTHER; note = guanosine-3'-phosphate
  modified_base 4: mod_base = OTHER; note = cytidine-3'-phosphate
  modified_base 5: mod_base = OTHER; note = guanosine-3'-phosphate
  modified_base 6: mod_base = OTHER; note = uridine-3'-phosphate
  modified_base 7: mod_base = OTHER; note = guanosine-3'-phosphate
  modified_base 8: mod_base = OTHER; note = guanosine-3'-phosphate
  modified_base 9: mod_base = OTHER; note = adenosine-3'-phosphate
  modified_base 10: mod_base = OTHER; note = adenosine-3'-phosphate
  modified_base 11: mod_base = OTHER; note = uridine-3'-phosphate
  modified_base 12: mod_base = OTHER; note = uridine-3'-phosphate
  modified_base 13: mod_base = OTHER; note = cytidine-3'-phosphate
  modified_base 14: mod_base = OTHER; note = adenosine-3'-phosphate
  modified_base 15: mod_base = OTHER; note = adenosine-3'-phosphate
  modified_base 16: mod_base = OTHER; note = uridine-3'-phosphate
  modified_base 17: mod_base = OTHER; note = guanosine-3'-phosphate
  modified_base 18: mod_base = OTHER; note = cytidine-3'-phosphate
  modified_base 19: mod_base = OTHER; note = adenosine-3'-phosphate
  misc_feature 1..19: note = RNA
  misc_feature 20..21: note = DNA
cagcgtggaattcaatgcatt

SEQ ID NO: 1150 - DNA, 21 bp, synthetic construct
  source 1..21: mol_type = other DNA
  modified_base 1: mod_base = OTHER; note = cytidine-3'-phosphate
  modified_base 2: mod_base = OTHER; note = uridine-3'-phosphate
  modified_base 3: mod_base = OTHER; note = guanosine-3'-phosphate
  modified_base 4: mod_base = OTHER; note = guanosine-3'-phosphate
  modified_base 5: mod_base = OTHER; note = cytidine-3'-phosphate
  modified_base 6: mod_base = OTHER; note = cytidine-3'-phosphate
  modified_base 7: mod_base = OTHER; note = cytidine-3'-phosphate
  modified_base 8: mod_base = OTHER; note = adenosine-3'-phosphate
  modified_base 9: mod_base = OTHER; note = cytidine-3'-phosphate
  modified_base 10: mod_base = OTHER; note = guanosine-3'-phosphate
  modified_base 11: mod_base = OTHER; note = uridine-3'-phosphate
  modified_base 12: mod_base = OTHER; note = adenosine-3'-phosphate
  modified_base 13: mod_base = OTHER; note = guanosine-3'-phosphate
  modified_base 14: mod_base = OTHER; note = cytidine-3'-phosphate
  modified_base 15: mod_base = OTHER; note = uridine-3'-phosphate
  modified_base 16: mod_base = OTHER; note = guanosine-3'-phosphate
  modified_base 17: mod_base = OTHER; note = uridine-3'-phosphate
  modified_base 18: mod_base = OTHER; note = adenosine-3'-phosphate
  modified_base 19: mod_base = OTHER; note = guanosine-3'-phosphate
  misc_feature 1..19: note = RNA
  misc_feature 20..21: note = DNA
ctggcccacgtagctgtagtt

SEQ ID NO: 1151 - DNA, 21 bp, synthetic construct
  source 1..21: mol_type = other DNA
  modified_base 1: mod_base = OTHER; note = cytidine-3'-phosphate
  modified_base 2: mod_base = OTHER; note = uridine-3'-phosphate
  modified_base 3: mod_base = OTHER; note = guanosine-3'-phosphate
  modified_base 4: mod_base = OTHER; note = guanosine-3'-phosphate
  modified_base 5: mod_base = OTHER; note = cytidine-3'-phosphate
  modified_base 6: mod_base = OTHER; note = cytidine-3'-phosphate
  modified_base 7: mod_base = OTHER; note = cytidine-3'-phosphate
  modified_base 8: mod_base = OTHER; note = uridine-3'-phosphate
  modified_base 9: mod_base = OTHER; note = guanosine-3'-phosphate
  modified_base 10: mod_base = OTHER; note = guanosine-3'-phosphate
  modified_base 11: mod_base = OTHER; note = cytidine-3'-phosphate
  modified_base 12: mod_base = OTHER; note = cytidine-3'-phosphate
  modified_base 13: mod_base = OTHER; note = cytidine-3'-phosphate
  modified_base 14: mod_base = OTHER; note = adenosine-3'-phosphate
  modified_base 15: mod_base = OTHER; note = cytidine-3'-phosphate
  modified_base 16: mod_base = OTHER; note = guanosine-3'-phosphate
  modified_base 17: mod_base = OTHER; note = uridine-3'-phosphate
  modified_base 18: mod_base = OTHER; note = adenosine-3'-phosphate
  modified_base 19: mod_base = OTHER; note = guanosine-3'-phosphate
  misc_feature 1..19: note = RNA
  misc_feature 20..21: note = DNA
ctggccctggcccacgtagtt

SEQ ID NO: 1152 - DNA, 21 bp, synthetic construct
  source 1..21: mol_type = other DNA
  modified_base 1: mod_base = OTHER; note = adenosine-3'-phosphate
  modified_base 2: mod_base = OTHER; note = guanosine-3'-phosphate
  modified_base 3: mod_base = OTHER; note = cytidine-3'-phosphate
  modified_base 4: mod_base = OTHER; note = cytidine-3'-phosphate
  modified_base 5: mod_base = OTHER; note = guanosine-3'-phosphate
  modified_base 6: mod_base = OTHER; note = guanosine-3'-phosphate
  modified_base 7: mod_base = OTHER; note = adenosine-3'-phosphate
  modified_base 8: mod_base = OTHER; note = guanosine-3'-phosphate
  modified_base 9: mod_base = OTHER; note = guanosine-3'-phosphate
  modified_base 10: mod_base = OTHER; note = adenosine-3'-phosphate
  modified_base 11: mod_base = OTHER; note = cytidine-3'-phosphate
  modified_base 12: mod_base = OTHER; note = cytidine-3'-phosphate
  modified_base 13: mod_base = OTHER; note = uridine-3'-phosphate
  modified_base 14: mod_base = OTHER; note = guanosine-3'-phosphate
  modified_base 15: mod_base = OTHER; note = guanosine-3'-phosphate
  modified_base 16: mod_base = OTHER; note = cytidine-3'-phosphate
  modified_base 17: mod_base = OTHER; note = cytidine-3'-phosphate
  modified_base 18: mod_base = OTHER; note = cytidine-3'-phosphate
  modified_base 19: mod_base = OTHER; note = uridine-3'-phosphate
  misc_feature 1..19: note = RNA
  misc_feature 20..21: note = DNA
agccggaggacctggcccttt

SEQ ID NO: 1153 - DNA, 21 bp, synthetic construct
  source 1..21: mol_type = other DNA
  modified_base 1: mod_base = OTHER; note = guanosine-3'-phosphate
  modified_base 2: mod_base = OTHER; note = uridine-3'-phosphate
  modified_base 3: mod_base = OTHER; note = cytidine-3'-phosphate
  modified_base 4: mod_base = OTHER; note = adenosine-3'-phosphate
  modified_base 5: mod_base = OTHER; note = guanosine-3'-phosphate
  modified_base 6: mod_base = OTHER; note = guanosine-3'-phosphate
  modified_base 7: mod_base = OTHER; note = cytidine-3'-phosphate
  modified_base 8: mod_base = OTHER; note = cytidine-3'-phosphate
  modified_base 9: mod_base = OTHER; note = cytidine-3'-phosphate
  modified_base 10: mod_base = OTHER; note = cytidine-3'-phosphate
  modified_base 11: mod_base = OTHER; note = uridine-3'-phosphate
  modified_base 12: mod_base = OTHER; note = uridine-3'-phosphate
  modified_base 13: mod_base = OTHER; note = cytidine-3'-phosphate
  modified_base 14: mod_base = OTHER; note = adenosine-3'-phosphate
  modified_base 15: mod_base = OTHER; note = guanosine-3'-phosphate
  modified_base 16: mod_base = OTHER; note = cytidine-3'-phosphate
  modified_base 17: mod_base = OTHER; note = cytidine-3'-phosphate
  modified_base 18: mod_base = OTHER; note = guanosine-3'-phosphate
  modified_base 19: mod_base = OTHER; note = guanosine-3'-phosphate
  misc_feature 1..19: note = RNA
  misc_feature 20..21: note = DNA
gtcaggccccttcagccggtt

SEQ ID NO: 1154 - DNA, 21 bp, synthetic construct
  source 1..21: mol_type = other DNA
  modified_base 1: mod_base = OTHER; note = adenosine-3'-phosphate
  modified_base 2: mod_base = OTHER; note = guanosine-3'-phosphate
  modified_base 3: mod_base = OTHER; note = guanosine-3'-phosphate
  modified_base 4: mod_base = OTHER; note = cytidine-3'-phosphate
  modified_base 5: mod_base = OTHER; note = cytidine-3'-phosphate
  modified_base 6: mod_base = OTHER; note = adenosine-3'-phosphate
  modified_base 7: mod_base = OTHER; note = guanosine-3'-phosphate
  modified_base 8: mod_base = OTHER; note = guanosine-3'-phosphate
  modified_base 9: mod_base = OTHER; note = uridine-3'-phosphate
  modified_base 10: mod_base = OTHER; note = guanosine-3'-phosphate
  modified_base 11: mod_base = OTHER; note = guanosine-3'-phosphate
  modified_base 12: mod_base = OTHER; note = uridine-3'-phosphate
  modified_base 13: mod_base = OTHER; note = cytidine-3'-phosphate
  modified_base 14: mod_base = OTHER; note = adenosine-3'-phosphate
  modified_base 15: mod_base = OTHER; note = guanosine-3'-phosphate
  modified_base 16: mod_base = OTHER; note = guanosine-3'-phosphate
  modified_base 17: mod_base = OTHER; note = cytidine-3'-phosphate
  modified_base 18: mod_base = OTHER; note = cytidine-3'-phosphate
  modified_base 19: mod_base = OTHER; note = cytidine-3'-phosphate
  misc_feature 1..19: note = RNA
  misc_feature 20..21: note = DNA
aggccaggtggtcaggccctt

SEQ ID NO: 1155 - DNA, 21 bp, synthetic construct
  source 1..21: mol_type = other DNA
  modified_base 1: mod_base = OTHER; note = guanosine-3'-phosphate
  modified_base 2: mod_base = OTHER; note = cytidine-3'-phosphate
  modified_base 3: mod_base = OTHER; note = adenosine-3'-phosphate
  modified_base 4: mod_base = OTHER; note = guanosine-3'-phosphate
  modified_base 5: mod_base = OTHER; note = cytidine-3'-phosphate
  modified_base 6: mod_base = OTHER; note = uridine-3'-phosphate
  modified_base 7: mod_base = OTHER; note = guanosine-3'-phosphate
  modified_base 8: mod_base = OTHER; note = guanosine-3'-phosphate
  modified_base 9: mod_base = OTHER; note = adenosine-3'-phosphate
  modified_base 10: mod_base = OTHER; note = guanosine-3'-phosphate
  modified_base 11: mod_base = OTHER; note = guanosine-3'-phosphate
  modified_base 12: mod_base = OTHER; note = cytidine-3'-phosphate
  modified_base 13: mod_base = OTHER; note = cytidine-3'-phosphate
  modified_base 14: mod_base = OTHER; note = adenosine-3'-phosphate
  modified_base 15: mod_base = OTHER; note = guanosine-3'-phosphate
  modified_base 16: mod_base = OTHER; note = guanosine-3'-phosphate
  modified_base 17: mod_base = OTHER; note = uridine-3'-phosphate
  modified_base 18: mod_base = OTHER; note = guanosine-3'-phosphate
  modified_base 19: mod_base = OTHER; note = guanosine-3'-phosphate
  misc_feature 1..19: note = RNA
  misc_feature 20..21: note = DNA
gcagctggaggccaggtggtt

SEQ ID NO: 1156 - DNA, 21 bp, synthetic construct
  source 1..21: mol_type = other DNA
  modified_base 1: mod_base = OTHER; note = adenosine-3'-phosphate
  modified_base 2: mod_base = OTHER; note = guanosine-3'-phosphate
  modified_base 3: mod_base = OTHER; note = guanosine-3'-phosphate
  modified_base 4: mod_base = OTHER; note = uridine-3'-phosphate
  modified_base 5: mod_base = OTHER; note = guanosine-3'-phosphate
  modified_base 6: mod_base = OTHER; note = cytidine-3'-phosphate
  modified_base 7: mod_base = OTHER; note = cytidine-3'-phosphate
  modified_base 8: mod_base = OTHER; note = adenosine-3'-phosphate
  modified_base 9: mod_base = OTHER; note = cytidine-3'-phosphate
  modified_base 10: mod_base = OTHER; note = adenosine-3'-phosphate
  modified_base 11: mod_base = OTHER; note = guanosine-3'-phosphate
  modified_base 12: mod_base = OTHER; note = guanosine-3'-phosphate
  modified_base 13: mod_base = OTHER; note = cytidine-3'-phosphate
  modified_base 14: mod_base = OTHER; note = adenosine-3'-phosphate
  modified_base 15: mod_base = OTHER; note = guanosine-3'-phosphate
  modified_base 16: mod_base = OTHER; note = cytidine-3'-phosphate
  modified_base 17: mod_base = OTHER; note = uridine-3'-phosphate
  modified_base 18: mod_base = OTHER; note = guanosine-3'-phosphate
  modified_base 19: mod_base = OTHER; note = guanosine-3'-phosphate
  misc_feature 1..19: note = RNA
  misc_feature 20..21: note = DNA
aggtgccacaggcagctggtt

SEQ ID NO: 1157 - DNA, 21 bp, synthetic construct
  source 1..21: mol_type = other DNA
  modified_base 1: mod_base = OTHER; note = guanosine-3'-phosphate
  modified_base 2: mod_base = OTHER; note = guanosine-3'-phosphate
  modified_base 3: mod_base = OTHER; note = cytidine-3'-phosphate
  modified_base 4: mod_base = OTHER; note = cytidine-3'-phosphate
  modified_base 5: mod_base = OTHER; note = cytidine-3'-phosphate
  modified_base 6: mod_base = OTHER; note = uridine-3'-phosphate
  modified_base 7: mod_base = OTHER; note = guanosine-3'-phosphate
  modified_base 8: mod_base = OTHER; note = cytidine-3'-phosphate
  modified_base 9: mod_base = OTHER; note = adenosine-3'-phosphate
  modified_base 10: mod_base = OTHER; note = guanosine-3'-phosphate
  modified_base 11: mod_base = OTHER; note = guanosine-3'-phosphate
  modified_base 12: mod_base = OTHER; note = uridine-3'-phosphate
  modified_base 13: mod_base = OTHER; note = guanosine-3'-phosphate
  modified_base 14: mod_base = OTHER; note = cytidine-3'-phosphate
  modified_base 15: mod_base = OTHER; note = cytidine-3'-phosphate
  modified_base 16: mod_base = OTHER; note = adenosine-3'-phosphate
  modified_base 17: mod_base = OTHER; note = cytidine-3'-phosphate
  modified_base 18: mod_base = OTHER; note = adenosine-3'-phosphate
  modified_base 19: mod_base = OTHER; note = guanosine-3'-phosphate
  misc_feature 1..19: note = RNA
  misc_feature 20..21: note = DNA
ggccctgcaggtgccacagtt

SEQ ID NO: 1158 - DNA, 21 bp, synthetic construct
  source 1..21: mol_type = other DNA
  modified_base 1: mod_base = OTHER; note = guanosine-3'-phosphate
  modified_base 2: mod_base = OTHER; note = guanosine-3'-phosphate
  modified_base 3: mod_base = OTHER; note = uridine-3'-phosphate
  modified_base 4: mod_base = OTHER; note = cytidine-3'-phosphate
  modified_base 5: mod_base = OTHER; note = cytidine-3'-phosphate
  modified_base 6: mod_base = OTHER; note = uridine-3'-phosphate
  modified_base 7: mod_base = OTHER; note = uridine-3'-phosphate
  modified_base 8: mod_base = OTHER; note = guanosine-3'-phosphate
  modified_base 9: mod_base = OTHER; note = guanosine-3'-phosphate
  modified_base 10: mod_base = OTHER; note = guanosine-3'-phosphate
  modified_base 11: mod_base = OTHER; note = guanosine-3'-phosphate
  modified_base 12: mod_base = OTHER; note = cytidine-3'-phosphate
  modified_base 13: mod_base = OTHER; note = cytidine-3'-phosphate
  modified_base 14: mod_base = OTHER; note = cytidine-3'-phosphate
  modified_base 15: mod_base = OTHER; note = uridine-3'-phosphate
  modified_base 16: mod_base = OTHER; note = guanosine-3'-phosphate
  modified_base 17: mod_base = OTHER; note = cytidine-3'-phosphate
  modified_base 18: mod_base = OTHER; note = adenosine-3'-phosphate
  modified_base 19: mod_base = OTHER; note = guanosine-3'-phosphate
  misc_feature 1..19: note = RNA
  misc_feature 20..21: note = DNA
ggtccttggggccctgcagtt

SEQ ID NO: 1159 - DNA, 21 bp, synthetic construct
  source 1..21: mol_type = other DNA
  modified_base 1: mod_base = OTHER; note = uridine-3'-phosphate
  modified_base 2: mod_base = OTHER; note = uridine-3'-phosphate
  modified_base 3: mod_base = OTHER; note = guanosine-3'-phosphate
  modified_base 4: mod_base = OTHER; note = adenosine-3'-phosphate
  modified_base 5: mod_base = OTHER; note = guanosine-3'-phosphate
  modified_base 6: mod_base = OTHER; note = cytidine-3'-phosphate
  modified_base 7: mod_base = OTHER; note = adenosine-3'-phosphate
  modified_base 8: mod_base = OTHER; note = uridine-3'-phosphate
  modified_base 9: mod_base = OTHER; note = guanosine-3'-phosphate
  modified_base 10: mod_base = OTHER; note = adenosine-3'-phosphate
  modified_base 11: mod_base = OTHER; note = guanosine-3'-phosphate
  modified_base 12: mod_base = OTHER; note = guanosine-3'-phosphate
  modified_base 13: mod_base = OTHER; note = uridine-3'-phosphate
  modified_base 14: mod_base = OTHER; note = cytidine-3'-phosphate
  modified_base 15: mod_base = OTHER; note = cytidine-3'-phosphate
  modified_base 16: mod_base = OTHER; note = uridine-3'-phosphate
  modified_base 17: mod_base = OTHER; note = uridine-3'-phosphate
  modified_base 18: mod_base = OTHER; note = guanosine-3'-phosphate
  modified_base 19: mod_base = OTHER; note = guanosine-3'-phosphate
  misc_feature 1..19: note = RNA
  misc_feature 20..21: note = DNA
ttgagcatgaggtccttggtt

SEQ ID NO: 1160 - DNA, 21 bp, synthetic construct
  source 1..21: mol_type = other DNA
  modified_base 1: mod_base = OTHER; note = uridine-3'-phosphate
  modified_base 2: mod_base = OTHER; note = cytidine-3'-phosphate
  modified_base 3: mod_base = OTHER; note = cytidine-3'-phosphate
  modified_base 4: mod_base = OTHER; note = adenosine-3'-phosphate
  modified_base 5: mod_base = OTHER; note = guanosine-3'-phosphate
  modified_base 6: mod_base = OTHER; note = cytidine-3'-phosphate
  modified_base 7: mod_base = OTHER; note = cytidine-3'-phosphate
  modified_base 8: mod_base = OTHER; note = guanosine-3'-phosphate
  modified_base 9: mod_base = OTHER; note = guanosine-3'-phosphate
  modified_base 10: mod_base = OTHER; note = adenosine-3'-phosphate
  modified_base 11: mod_base = OTHER; note = guanosine-3'-phosphate
  modified_base 12: mod_base = OTHER; note = uridine-3'-phosphate
  modified_base 13: mod_base = OTHER; note = uridine-3'-phosphate
  modified_base 14: mod_base = OTHER; note = uridine-3'-phosphate
  modified_base 15: mod_base = OTHER; note = guanosine-3'-phosphate
  modified_base 16: mod_base = OTHER; note = adenosine-3'-phosphate
  modified_base 17: mod_base = OTHER; note = guanosine-3'-phosphate
  modified_base 18: mod_base = OTHER; note = cytidine-3'-phosphate
  modified_base 19: mod_base = OTHER; note = adenosine-3'-phosphate
  misc_feature 1..19: note = RNA
  misc_feature 20..21: note = DNA
tccagccggagtttgagcatt

SEQ ID NO: 1161 - DNA, 21 bp, synthetic construct
  source 1..21: mol_type = other DNA
  modified_base 1: mod_base = OTHER; note = cytidine-3'-phosphate
  modified_base 2: mod_base = OTHER; note = adenosine-3'-phosphate
  modified_base 3: mod_base = OTHER; note = guanosine-3'-phosphate
  modified_base 4: mod_base = OTHER; note = cytidine-3'-phosphate
  modified_base 5: mod_base = OTHER; note = guanosine-3'-phosphate
  modified_base 6: mod_base = OTHER; note = uridine-3'-phosphate
  modified_base 7: mod_base = OTHER; note = cytidine-3'-phosphate
  modified_base 8: mod_base = OTHER; note = cytidine-3'-phosphate
  modified_base 9: mod_base = OTHER; note = adenosine-3'-phosphate
  modified_base 10: mod_base = OTHER; note = cytidine-3'-phosphate
  modified_base 11: mod_base = OTHER; note = uridine-3'-phosphate
  modified_base 12: mod_base = OTHER; note = cytidine-3'-phosphate
  modified_base 13: mod_base = OTHER; note = cytidine-3'-phosphate
  modified_base 14: mod_base = OTHER; note = adenosine-3'-phosphate
  modified_base 15: mod_base = OTHER; note = guanosine-3'-phosphate
  modified_base 16: mod_base = OTHER; note = cytidine-3'-phosphate
  modified_base 17: mod_base = OTHER; note = cytidine-3'-phosphate
  modified_base 18: mod_base = OTHER; note = guanosine-3'-phosphate
  modified_base 19: mod_base = OTHER; note = guanosine-3'-phosphate
  misc_feature 1..19: note = RNA
  misc_feature 20..21: note = DNA
cagcgtccactccagccggtt

SEQ ID NO: 1162 - DNA, 21 bp, synthetic construct
  source 1..21: mol_type = other DNA
  modified_base 1: mod_base = OTHER; note = cytidine-3'-phosphate
  modified_base 2: mod_base = OTHER; note = cytidine-3'-phosphate
  modified_base 3: mod_base = OTHER; note = guanosine-3'-phosphate
  modified_base 4: mod_base = OTHER; note = guanosine-3'-phosphate
  modified_base 5: mod_base = OTHER; note = cytidine-3'-phosphate
  modified_base 6: mod_base = OTHER; note = adenosine-3'-phosphate
  modified_base 7: mod_base = OTHER; note = cytidine-3'-phosphate
  modified_base 8: mod_base = OTHER; note = uridine-3'-phosphate
  modified_base 9: mod_base = OTHER; note = cytidine-3'-phosphate
  modified_base 10: mod_base = OTHER; note = uridine-3'-phosphate
  modified_base 11: mod_base = OTHER; note = guanosine-3'-phosphate
  modified_base 12: mod_base = OTHER; note = cytidine-3'-phosphate
  modified_base 13: mod_base = OTHER; note = cytidine-3'-phosphate
  modified_base 14: mod_base = OTHER; note = adenosine-3'-phosphate
  modified_base 15: mod_base = OTHER; note = guanosine-3'-phosphate
  modified_base 16: mod_base = OTHER; note = cytidine-3'-phosphate
  modified_base 17: mod_base = OTHER; note = guanosine-3'-phosphate
  modified_base 18: mod_base = OTHER; note = uridine-3'-phosphate
  modified_base 19: mod_base = OTHER; note = cytidine-3'-phosphate
  misc_feature 1..19: note = RNA
  misc_feature 20..21: note = DNA
ccggcactctgccagcgtctt

SEQ ID NO: 1163 - DNA, 21 bp, synthetic construct
  source 1..21: mol_type = other DNA
  modified_base 1: mod_base = OTHER; note = uridine-3'-phosphate
  modified_base 2: mod_base = OTHER; note = cytidine-3'-phosphate
  modified_base 3: mod_base = OTHER; note = guanosine-3'-phosphate
  modified_base 4: mod_base = OTHER; note = guanosine-3'-phosphate
  modified_base 5: mod_base = OTHER; note = uridine-3'-phosphate
  modified_base 6: mod_base = OTHER; note = cytidine-3'-phosphate
  modified_base 7: mod_base = OTHER; note = cytidine-3'-phosphate
  modified_base 8: mod_base = OTHER; note = cytidine-3'-phosphate
  modified_base 9: mod_base = OTHER; note = guanosine-3'-phosphate
  modified_base 10: mod_base = OTHER; note = guanosine-3'-phosphate
  modified_base 11: mod_base = OTHER; note = cytidine-3'-phosphate
  modified_base 12: mod_base = OTHER; note = adenosine-3'-phosphate
  modified_base 13: mod_base = OTHER; note = cytidine-3'-phosphate
  modified_base 14: mod_base = OTHER; note = uridine-3'-phosphate
  modified_base 15: mod_base = OTHER; note = cytidine-3'-phosphate
  modified_base 16: mod_base = OTHER; note = uridine-3'-phosphate
  modified_base 17: mod_base = OTHER; note = guanosine-3'-phosphate
  modified_base 18: mod_base = OTHER; note = cytidine-3'-phosphate
  modified_base 19: mod_base = OTHER; note = cytidine-3'-phosphate
  misc_feature 1..19: note = RNA
  misc_feature 20..21: note = DNA
tcggtcccggcactctgcctt

SEQ ID NO: 1164 - DNA, 21 bp, synthetic construct
  source 1..21: mol_type = other DNA
  modified_base 1: mod_base = OTHER; note = uridine-3'-phosphate
  modified_base 2: mod_base = OTHER; note = cytidine-3'-phosphate
  modified_base 3: mod_base = OTHER; note = adenosine-3'-phosphate
  modified_base 4: mod_base = OTHER; note = uridine-3'-phosphate
  modified_base 5: mod_base = OTHER; note = adenosine-3'-phosphate
  modified_base 6: mod_base = OTHER; note = cytidine-3'-phosphate
  modified_base 7: mod_base = OTHER; note = adenosine-3'-phosphate
  modified_base 8: mod_base = OTHER; note = uridine-3'-phosphate
  modified_base 9: mod_base = OTHER; note = guanosine-3'-phosphate
  modified_base 10: mod_base = OTHER; note = guanosine-3'-phosphate
  modified_base 11: mod_base = OTHER; note = cytidine-3'-phosphate
  modified_base 12: mod_base = OTHER; note = cytidine-3'-phosphate
  modified_base 13: mod_base = OTHER; note = adenosine-3'-phosphate
  modified_base 14: mod_base = OTHER; note = guanosine-3'-phosphate
  modified_base 15: mod_base = OTHER; note = uridine-3'-phosphate
  modified_base 16: mod_base = OTHER; note = cytidine-3'-phosphate
  modified_base 17: mod_base = OTHER; note = guanosine-3'-phosphate
  modified_base 18: mod_base = OTHER; note = guanosine-3'-phosphate
  modified_base 19: mod_base = OTHER; note = uridine-3'-phosphate
  misc_feature 1..19: note = RNA
  misc_feature 20..21: note = DNA
tcatacatggccagtcggttt

SEQ ID NO: 1165 - DNA, 21 bp, synthetic construct
  source 1..21: mol_type = other DNA
  modified_base 1: mod_base = OTHER; note = cytidine-3'-phosphate
  modified_base 2: mod_base = OTHER; note = cytidine-3'-phosphate
  modified_base 3: mod_base = OTHER; note = guanosine-3'-phosphate
  modified_base 4: mod_base = OTHER; note = guanosine-3'-phosphate
  modified_base 5: mod_base = OTHER; note = cytidine-3'-phosphate
  modified_base 6: mod_base = OTHER; note = cytidine-3'-phosphate
  modified_base 7: mod_base = OTHER; note = adenosine-3'-phosphate
  modified_base 8: mod_base = OTHER; note = cytidine-3'-phosphate
  modified_base 9: mod_base = OTHER; note = guanosine-3'-phosphate
  modified_base 10: mod_base = OTHER; note = uridine-3'-phosphate
  modified_base 11: mod_base = OTHER; note = cytidine-3'-phosphate
  modified_base 12: mod_base = OTHER; note = adenosine-3'-phosphate
  modified_base 13: mod_base = OTHER; note = uridine-3'-phosphate
  modified_base 14: mod_base = OTHER; note = adenosine-3'-phosphate
  modified_base 15: mod_base = OTHER; note = cytidine-3'-phosphate
  modified_base 16: mod_base = OTHER; note = adenosine-3'-phosphate
  modified_base 17: mod_base = OTHER; note = uridine-3'-phosphate
  modified_base 18: mod_base = OTHER; note = guanosine-3'-phosphate
  modified_base 19: mod_base = OTHER; note = guanosine-3'-phosphate
  misc_feature 1..19: note = RNA
  misc_feature 20..21: note = DNA
ccggccacgtcatacatggtt

SEQ ID NO: 1166 - DNA, 21 bp, synthetic construct
  source 1..21: mol_type = other DNA
  modified_base 1: mod_base = OTHER; note = uridine-3'-phosphate
  modified_base 2: mod_base = OTHER; note = cytidine-3'-phosphate
  modified_base 3: mod_base = OTHER; note = uridine-3'-phosphate
  modified_base 4: mod_base = OTHER; note = cytidine-3'-phosphate
  modified_base 5: mod_base = OTHER; note = cytidine-3'-phosphate
  modified_base 6: mod_base = OTHER; note = adenosine-3'-phosphate
  modified_base 7: mod_base = OTHER; note = guanosine-3'-phosphate
  modified_base 8: mod_base = OTHER; note = guanosine-3'-phosphate
  modified_base 9: mod_base = OTHER; note = guanosine-3'-phosphate
  modified_base 10: mod_base = OTHER; note = guanosine-3'-phosphate
  modified_base 11: mod_base = OTHER; note = cytidine-3'-phosphate
  modified_base 12: mod_base = OTHER; note = cytidine-3'-phosphate
  modified_base 13: mod_base = OTHER; note = cytidine-3'-phosphate
  modified_base 14: mod_base = OTHER; note = guanosine-3'-phosphate
  modified_base 15: mod_base = OTHER; note = guanosine-3'-phosphate
  modified_base 16: mod_base = OTHER; note = cytidine-3'-phosphate
  modified_base 17: mod_base = OTHER; note = cytidine-3'-phosphate
  modified_base 18: mod_base = OTHER; note = adenosine-3'-phosphate
  modified_base 19: mod_base = OTHER; note = cytidine-3'-phosphate
  misc_feature 1..19: note = RNA
  misc_feature 20..21: note = DNA
tctccaggggcccggccactt

SEQ ID NO: 1167 - DNA, 21 bp, synthetic construct
  source 1..21: mol_type = other DNA
  modified_base 1: mod_base = OTHER; note = adenosine-3'-phosphate
  modified_base 2: mod_base = OTHER; note = uridine-3'-phosphate
  modified_base 3: mod_base = OTHER; note = guanosine-3'-phosphate
  modified_base 4: mod_base = OTHER; note = adenosine-3'-phosphate
  modified_base 5: mod_base = OTHER; note = guanosine-3'-phosphate
  modified_base 6: mod_base = OTHER; note = cytidine-3'-phosphate
  modified_base 7: mod_base = OTHER; note = cytidine-3'-phosphate
  modified_base 8: mod_base = OTHER; note = uridine-3'-phosphate
  modified_base 9: mod_base = OTHER; note = cytidine-3'-phosphate
  modified_base 10: mod_base = OTHER; note = uridine-3'-phosphate
  modified_base 11: mod_base = OTHER; note = uridine-3'-phosphate
  modified_base 12: mod_base = OTHER; note = cytidine-3'-phosphate
  modified_base 13: mod_base = OTHER; note = uridine-3'-phosphate
  modified_base 14: mod_base = OTHER; note = cytidine-3'-phosphate
  modified_base 15: mod_base = OTHER; note = cytidine-3'-phosphate
  modified_base 16: mod_base = OTHER; note = adenosine-3'-phosphate
  modified_base 17: mod_base = OTHER; note = guanosine-3'-phosphate
  modified_base 18: mod_base = OTHER; note = guanosine-3'-phosphate
  modified_base 19: mod_base = OTHER; note = guanosine-3'-phosphate
  misc_feature 1..19: note = RNA
  misc_feature 20..21: note = DNA
atgagcctcttctccagggtt

SEQ ID NO: 1168 - DNA, 21 bp, synthetic construct
  source 1..21: mol_type = other DNA
  modified_base 1: mod_base = OTHER; note = guanosine-3'-phosphate
  modified_base 2: mod_base = OTHER; note = adenosine-3'-phosphate
  modified_base 3: mod_base = OTHER; note = guanosine-3'-phosphate
  modified_base 4: mod_base = OTHER; note = guanosine-3'-phosphate
  modified_base 5: mod_base = OTHER; note = uridine-3'-phosphate
  modified_base 6: mod_base = OTHER; note = guanosine-3'-phosphate
  modified_base 7: mod_base = OTHER; note = adenosine-3'-phosphate
  modified_base 8: mod_base = OTHER; note = uridine-3'-phosphate
  modified_base 9: mod_base = OTHER; note = guanosine-3'-phosphate
  modified_base 10: mod_base = OTHER; note = adenosine-3'-phosphate
  modified_base 11: mod_base = OTHER; note = guanosine-3'-phosphate
  modified_base 12: mod_base = OTHER; note = cytidine-3'-phosphate
  modified_base 13: mod_base = OTHER; note = cytidine-3'-phosphate
  modified_base 14: mod_base = OTHER; note = uridine-3'-phosphate
  modified_base 15: mod_base = OTHER; note = cytidine-3'-phosphate
  modified_base 16: mod_base = OTHER; note = uridine-3'-phosphate
  modified_base 17: mod_base = OTHER; note = uridine-3'-phosphate
  modified_base 18: mod_base = OTHER; note = cytidine-3'-phosphate
  modified_base 19: mod_base = OTHER; note = uridine-3'-phosphate
  misc_feature 1..19: note = RNA
  misc_feature 20..21: note = DNA
gaggtgatgagcctcttcttt

SEQ ID NO: 1169 - DNA, 21 bp, synthetic construct
  source 1..21: mol_type = other DNA
  modified_base 1: mod_base = OTHER; note = uridine-3'-phosphate
  modified_base 2: mod_base = OTHER; note = guanosine-3'-phosphate
  modified_base 3: mod_base = OTHER; note = cytidine-3'-phosphate
  modified_base 4: mod_base = OTHER; note = adenosine-3'-phosphate
  modified_base 5: mod_base = OTHER; note = guanosine-3'-phosphate
  modified_base 6: mod_base = OTHER; note = cytidine-3'-phosphate
  modified_base 7: mod_base = OTHER; note = cytidine-3'-phosphate
  modified_base 8: mod_base = OTHER; note = guanosine-3'-phosphate
  modified_base 9: mod_base = OTHER; note = uridine-3'-phosphate
  modified_base 10: mod_base = OTHER; note = adenosine-3'-phosphate
  modified_base 11: mod_base = OTHER; note = cytidine-3'-phosphate
  modified_base 12: mod_base = OTHER; note = adenosine-3'-phosphate
  modified_base 13: mod_base = OTHER; note = cytidine-3'-phosphate
  modified_base 14: mod_base = OTHER; note = cytidine-3'-phosphate
  modified_base 15: mod_base = OTHER; note = guanosine-3'-phosphate
  modified_base 16: mod_base = OTHER; note = adenosine-3'-phosphate
  modified_base 17: mod_base = OTHER; note = guanosine-3'-phosphate
  modified_base 18: mod_base = OTHER; note = guanosine-3'-phosphate
  modified_base 19: mod_base = OTHER; note = uridine-3'-phosphate
  misc_feature 1..19: note = RNA
  misc_feature 20..21: note = DNA
tgcagccgtacaccgaggttt

SEQ ID NO: 1170 - DNA, 21 bp, synthetic construct
  source 1..21: mol_type = other DNA
  modified_base 1: mod_base = OTHER; note = uridine-3'-phosphate
  modified_base 2: mod_base = OTHER; note = cytidine-3'-phosphate
  modified_base 3: mod_base = OTHER; note = cytidine-3'-phosphate
  modified_base 4: mod_base = OTHER; note = uridine-3'-phosphate
  modified_base 5: mod_base = OTHER; note = guanosine-3'-phosphate
  modified_base 6: mod_base = OTHER; note = guanosine-3'-phosphate
  modified_base 7: mod_base = OTHER; note = cytidine-3'-phosphate
  modified_base 8: mod_base = OTHER; note = guanosine-3'-phosphate
  modified_base 9: mod_base = OTHER; note = guanosine-3'-phosphate
  modified_base 10: mod_base = OTHER; note = cytidine-3'-phosphate
  modified_base 11: mod_base = OTHER; note = uridine-3'-phosphate
  modified_base 12: mod_base = OTHER; note = guanosine-3'-phosphate
  modified_base 13: mod_base = OTHER; note = cytidine-3'-phosphate
  modified_base 14: mod_base = OTHER; note = adenosine-3'-phosphate
  modified_base 15: mod_base = OTHER; note = guanosine-3'-phosphate
  modified_base 16: mod_base = OTHER; note = cytidine-3'-phosphate
  modified_base 17: mod_base = OTHER; note = cytidine-3'-phosphate
  modified_base 18: mod_base = OTHER; note = guanosine-3'-phosphate
  modified_base 19: mod_base = OTHER; note = uridine-3'-phosphate
  misc_feature 1..19: note = RNA
  misc_feature 20..21: note = DNA
tcctggcggctgcagccgttt

SEQ ID NO: 1171 - DNA, 21 bp, synthetic construct
  source 1..21: mol_type = other DNA
  modified_base 1: mod_base = OTHER; note = adenosine-3'-phosphate
  modified_base 2: mod_base = OTHER; note = cytidine-3'-phosphate
  modified_base 3: mod_base = OTHER; note = cytidine-3'-phosphate
  modified_base 4: mod_base = OTHER; note = adenosine-3'-phosphate
  modified_base 5: mod_base = OTHER; note = cytidine-3'-phosphate
  modified_base 6: mod_base = OTHER; note = guanosine-3'-phosphate
  modified_base 7: mod_base = OTHER; note = guanosine-3'-phosphate
  modified_base 8: mod_base = OTHER; note = guanosine-3'-phosphate
  modified_base 9: mod_base = OTHER; note = cytidine-3'-phosphate
  modified_base 10: mod_base = OTHER; note = uridine-3'-phosphate
  modified_base 11: mod_base = OTHER; note = cytidine-3'-phosphate
  modified_base 12: mod_base = OTHER; note = cytidine-3'-phosphate
  modified_base 13: mod_base = OTHER; note = uridine-3'-phosphate
  modified_base 14: mod_base = OTHER; note = guanosine-3'-phosphate
  modified_base 15: mod_base = OTHER; note = guanosine-3'-phosphate
  modified_base 16: mod_base = OTHER; note = cytidine-3'-phosphate
  modified_base 17: mod_base = OTHER; note = guanosine-3'-phosphate
  modified_base 18: mod_base = OTHER; note = guanosine-3'-phosphate
  modified_base 19: mod_base = OTHER; note = cytidine-3'-phosphate
  misc_feature 1..19: note = RNA
  misc_feature 20..21: note = DNA
accacgggctcctggcggctt

SEQ ID NO: 1172 - DNA, 21 bp, synthetic construct
  source 1..21: mol_type = other DNA
  modified_base 1: mod_base = OTHER; note = adenosine-3'-phosphate
  modified_base 2: mod_base = OTHER; note = guanosine-3'-phosphate
  modified_base 3: mod_base = OTHER; note = adenosine-3'-phosphate
  modified_base 4: mod_base = OTHER; note = adenosine-3'-phosphate
  modified_base 5: mod_base = OTHER; note = cytidine-3'-phosphate
  modified_base 6: mod_base = OTHER; note = cytidine-3'-phosphate
  modified_base 7: mod_base = OTHER; note = uridine-3'-phosphate
  modified_base 8: mod_base = OTHER; note = cytidine-3'-phosphate
  modified_base 9: mod_base = OTHER; note = cytidine-3'-phosphate
  modified_base 10: mod_base = OTHER; note = adenosine-3'-phosphate
  modified_base 11: mod_base = OTHER; note = cytidine-3'-phosphate
  modified_base 12: mod_base = OTHER; note = cytidine-3'-phosphate
  modified_base 13: mod_base = OTHER; note = adenosine-3'-phosphate
  modified_base 14: mod_base = OTHER; note = cytidine-3'-phosphate
  modified_base 15: mod_base = OTHER; note = guanosine-3'-phosphate
  modified_base 16: mod_base = OTHER; note = guanosine-3'-phosphate
  modified_base 17: mod_base = OTHER; note = guanosine-3'-phosphate
  modified_base 18: mod_base = OTHER; note = cytidine-3'-phosphate
  modified_base 19: mod_base = OTHER; note = uridine-3'-phosphate
  misc_feature 1..19: note = RNA
  misc_feature 20..21: note = DNA
agaacctccaccacgggcttt

SEQ ID NO: 1173 - DNA, 21 bp, synthetic construct
  source 1..21: mol_type = other DNA
  modified_base 1: mod_base = OTHER; note = cytidine-3'-phosphate
  modified_base 2: mod_base = OTHER; note = cytidine-3'-phosphate
  modified_base 3: mod_base = OTHER; note = guanosine-3'-phosphate
  modified_base 4: mod_base = OTHER; note = adenosine-3'-phosphate
  modified_base 5: mod_base = OTHER; note = cytidine-3'-phosphate
  modified_base 6: mod_base = OTHER; note = guanosine-3'-phosphate
  modified_base 7: mod_base = OTHER; note = cytidine-3'-phosphate
  modified_base 8: mod_base = OTHER; note = cytidine-3'-phosphate
  modified_base 9: mod_base = OTHER; note = adenosine-3'-phosphate
  modified_base 10: mod_base = OTHER; note = guanosine-3'-phosphate
  modified_base 11: mod_base = OTHER; note = adenosine-3'-phosphate
  modified_base 12: mod_base = OTHER; note = adenosine-3'-phosphate
  modified_base 13: mod_base = OTHER; note = cytidine-3'-phosphate
  modified_base 14: mod_base = OTHER; note = cytidine-3'-phosphate
  modified_base 15: mod_base = OTHER; note = uridine-3'-phosphate
  modified_base 16: mod_base = OTHER; note = cytidine-3'-phosphate
  modified_base 17: mod_base = OTHER; note = cytidine-3'-phosphate
  modified_base 18: mod_base = OTHER; note = adenosine-3'-phosphate
  modified_base 19: mod_base = OTHER; note = cytidine-3'-phosphate
  misc_feature 1..19: note = RNA
  misc_feature 20..21: note = DNA
ccgacgccagaacctccactt

SEQ ID NO: 1174 - DNA, 21 bp, synthetic construct
  source 1..21: mol_type = other DNA
  modified_base 1: mod_base = OTHER; note = adenosine-3'-phosphate
  modified_base 2: mod_base = OTHER; note = uridine-3'-phosphate
  modified_base 3: mod_base = OTHER; note = guanosine-3'-phosphate
  modified_base 4: mod_base = OTHER; note = adenosine-3'-phosphate
  modified_base 5: mod_base = OTHER; note = uridine-3'-phosphate
  modified_base 6: mod_base = OTHER; note = guanosine-3'-phosphate
  modified_base 7: mod_base = OTHER; note = guanosine-3'-phosphate
  modified_base 8: mod_base = OTHER; note = cytidine-3'-phosphate
  modified_base 9: mod_base = OTHER; note = cytidine-3'-phosphate
  modified_base 10: mod_base = OTHER; note = cytidine-3'-phosphate
  modified_base 11: mod_base = OTHER; note = cytidine-3'-phosphate
  modified_base 12: mod_base = OTHER; note = cytidine-3'-phosphate
  modified_base 13: mod_base = OTHER; note = guanosine-3'-phosphate
  modified_base 14: mod_base = OTHER; note = adenosine-3'-phosphate
  modified_base 15: mod_base = OTHER; note = cytidine-3'-phosphate
  modified_base 16: mod_base = OTHER; note = guanosine-3'-phosphate
  modified_base 17: mod_base = OTHER; note = cytidine-3'-phosphate
  modified_base 18: mod_base = OTHER; note = cytidine-3'-phosphate
  modified_base 19: mod_base = OTHER; note = adenosine-3'-phosphate
  misc_feature 1..19: note = RNA
  misc_feature 20..21: note = DNA
atgatggcccccgacgccatt

SEQ ID NO: 1175 - DNA, 21 bp, synthetic construct
  source 1..21: mol_type = other DNA
  modified_base 1: mod_base = OTHER; note = cytidine-3'-phosphate
  modified_base 2: mod_base = OTHER; note = adenosine-3'-phosphate
  modified_base 3: mod_base = OTHER; note = guanosine-3'-phosphate
  modified_base 4: mod_base = OTHER; note = adenosine-3'-phosphate
  modified_base 5: mod_base = OTHER; note = cytidine-3'-phosphate
  modified_base 6: mod_base = OTHER; note = guanosine-3'-phosphate
  modified_base 7: mod_base = OTHER; note = adenosine-3'-phosphate
  modified_base 8: mod_base = OTHER; note = cytidine-3'-phosphate
  modified_base 9: mod_base = OTHER; note = cytidine-3'-phosphate
  modified_base 10: mod_base = OTHER; note = guanosine-3'-phosphate
  modified_base 11: mod_base = OTHER; note = cytidine-3'-phosphate
  modified_base 12: mod_base = OTHER; note = cytidine-3'-phosphate
  modified_base 13: mod_base = OTHER; note = adenosine-3'-phosphate
  modified_base 14: mod_base = OTHER; note = uridine-3'-phosphate
  modified_base 15: mod_base = OTHER; note = guanosine-3'-phosphate
  modified_base 16: mod_base = OTHER; note = adenosine-3'-phosphate
  modified_base 17: mod_base = OTHER; note = uridine-3'-phosphate
  modified_base 18: mod_base = OTHER; note = guanosine-3'-phosphate
  modified_base 19: mod_base = OTHER; note = guanosine-3'-phosphate
  misc_feature 1..19: note = RNA
  misc_feature 20..21: note = DNA
cagacgaccgccatgatggtt

SEQ ID NO: 1176 - DNA, 21 bp, synthetic construct
  source 1..21: mol_type = other DNA
  modified_base 1: mod_base = OTHER; note = cytidine-3'-phosphate
  modified_base 2: mod_base = OTHER; note = cytidine-3'-phosphate
  modified_base 3: mod_base = OTHER; note = uridine-3'-phosphate
  modified_base 4: mod_base = OTHER; note = uridine-3'-phosphate
  modified_base 5: mod_base = OTHER; note = cytidine-3'-phosphate
  modified_base 6: mod_base = OTHER; note = uridine-3'-phosphate
  modified_base 7: mod_base = OTHER; note = uridine-3'-phosphate
  modified_base 8: mod_base = OTHER; note = cytidine-3'-phosphate
  modified_base 9: mod_base = OTHER; note = cytidine-3'-phosphate
  modified_base 10: mod_base = OTHER; note = adenosine-3'-phosphate
  modified_base 11: mod_base = OTHER; note = guanosine-3'-phosphate
  modified_base 12: mod_base = OTHER; note = adenosine-3'-phosphate
  modified_base 13: mod_base = OTHER; note = cytidine-3'-phosphate
  modified_base 14: mod_base = OTHER; note = guanosine-3'-phosphate
  modified_base 15: mod_base = OTHER; note = adenosine-3'-phosphate
  modified_base 16: mod_base = OTHER; note = cytidine-3'-phosphate
  modified_base 17: mod_base = OTHER; note = cytidine-3'-phosphate
  modified_base 18: mod_base = OTHER; note = guanosine-3'-phosphate
  modified_base 19: mod_base = OTHER; note = cytidine-3'-phosphate
  misc_feature 1..19: note = RNA
  misc_feature 20..21: note = DNA
ccttcttccagacgaccgctt

SEQ ID NO: 1177 - DNA, 21 bp, synthetic construct
  source 1..21: mol_type = other DNA
  modified_base 1: mod_base = OTHER; note = cytidine-3'-phosphate
  modified_base 2: mod_base = OTHER; note = uridine-3'-phosphate
  modified_base 3: mod_base = OTHER; note = guanosine-3'-phosphate
  modified_base 4: mod_base = OTHER; note = uridine-3'-phosphate
  modified_base 5: mod_base = OTHER; note = guanosine-3'-phosphate
  modified_base 6: mod_base = OTHER; note = cytidine-3'-phosphate
  modified_base 7: mod_base = OTHER; note = adenosine-3'-phosphate
  modified_base 8: mod_base = OTHER; note = guanosine-3'-phosphate
  modified_base 9: mod_base = OTHER; note = guanosine-3'-phosphate
  modified_base 10: mod_base = OTHER; note = cytidine-3'-phosphate
  modified_base 11: mod_base = OTHER; note = cytidine-3'-phosphate
  modified_base 12: mod_base = OTHER; note = cytidine-3'-phosphate
  modified_base 13: mod_base = OTHER; note = uridine-3'-phosphate
  modified_base 14: mod_base = OTHER; note = uridine-3'-phosphate
  modified_base 15: mod_base = OTHER; note = cytidine-3'-phosphate
  modified_base 16: mod_base = OTHER; note = uridine-3'-phosphate
  modified_base 17: mod_base = OTHER; note = uridine-3'-phosphate
  modified_base 18: mod_base = OTHER; note = cytidine-3'-phosphate
  modified_base 19: mod_base = OTHER; note = cytidine-3'-phosphate
  misc_feature 1..19: note = RNA
  misc_feature 20..21: note = DNA
ctgtgcaggcccttcttcctt

SEQ ID NO: 1178 - DNA, 21 bp, synthetic construct
  source 1..21: mol_type = other DNA
  modified_base 1: mod_base = OTHER; note = guanosine-3'-phosphate
  modified_base 2: mod_base = OTHER; note = uridine-3'-phosphate
  modified_base 3: mod_base = OTHER; note = cytidine-3'-phosphate
  modified_base 4: mod_base = OTHER; note = guanosine-3'-phosphate
  modified_base 5: mod_base = OTHER; note = uridine-3'-phosphate
  modified_base 6: mod_base = OTHER; note = adenosine-3'-phosphate
  modified_base 7: mod_base = OTHER; note = guanosine-3'-phosphate
  modified_base 8: mod_base = OTHER; note = uridine-3'-phosphate
  modified_base 9: mod_base = OTHER; note = adenosine-3'-phosphate
  modified_base 10: mod_base = OTHER; note = guanosine-3'-phosphate
  modified_base 11: mod_base = OTHER; note = cytidine-3'-phosphate
  modified_base 12: mod_base = OTHER; note = uridine-3'-phosphate
  modified_base 13: mod_base = OTHER; note = guanosine-3'-phosphate
  modified_base 14: mod_base = OTHER; note = uridine-3'-phosphate
  modified_base 15: mod_base = OTHER; note = guanosine-3'-phosphate
  modified_base 16: mod_base = OTHER; note = cytidine-3'-phosphate
  modified_base 17: mod_base = OTHER; note = adenosine-3'-phosphate
  modified_base 18: mod_base = OTHER; note = guanosine-3'-phosphate
  modified_base 19: mod_base = OTHER; note = guanosine-3'-phosphate
  misc_feature 1..19: note = RNA
  misc_feature 20..21: note = DNA
gtcgtagtagctgtgcaggtt

SEQ ID NO: 1179 - DNA, 21 bp, synthetic construct
  source 1..21: mol_type = other DNA
  modified_base 1: mod_base = OTHER; note = adenosine-3'-phosphate
  modified_base 2: mod_base = OTHER; note = guanosine-3'-phosphate
  modified_base 3: mod_base = OTHER; note = cytidine-3'-phosphate
  modified_base 4: mod_base = OTHER; note = adenosine-3'-phosphate
  modified_base 5: mod_base = OTHER; note = cytidine-3'-phosphate
  modified_base 6: mod_base = OTHER; note = guanosine-3'-phosphate
  modified_base 7: mod_base = OTHER; note = adenosine-3'-phosphate
  modified_base 8: mod_base = OTHER; note = adenosine-3'-phosphate
  modified_base 9: mod_base = OTHER; note = guanosine-3'-phosphate
  modified_base 10: mod_base = OTHER; note = guanosine-3'-phosphate
  modified_base 11: mod_base = OTHER; note = guanosine-3'-phosphate
  modified_base 12: mod_base = OTHER; note = guanosine-3'-phosphate
  modified_base 13: mod_base = OTHER; note = uridine-3'-phosphate
  modified_base 14: mod_base = OTHER; note = cytidine-3'-phosphate
  modified_base 15: mod_base = OTHER; note = guanosine-3'-phosphate
  modified_base 16: mod_base = OTHER; note = uridine-3'-phosphate
  modified_base 17: mod_base = OTHER; note = adenosine-3'-phosphate
  modified_base 18: mod_base = OTHER; note = guanosine-3'-phosphate
  modified_base 19: mod_base = OTHER; note = uridine-3'-phosphate
  misc_feature 1..19: note = RNA
  misc_feature 20..21: note = DNA
agcacgaaggggtcgtagttt

SEQ ID NO: 1180 - DNA, 21 bp, synthetic construct
  source 1..21: mol_type = other DNA
  modified_base 1: mod_base = OTHER; note = uridine-3'-phosphate
  modified_base 2: mod_base = OTHER; note = guanosine-3'-phosphate
  modified_base 3: mod_base = OTHER; note = cytidine-3'-phosphate
  modified_base 4: mod_base = OTHER; note = adenosine-3'-phosphate
  modified_base 5: mod_base = OTHER; note = cytidine-3'-phosphate
  modified_base 6: mod_base = OTHER; note = guanosine-3'-phosphate
  modified_base 7: mod_base = OTHER; note = guanosine-3'-phosphate
  modified_base 8: mod_base = OTHER; note = adenosine-3'-phosphate
  modified_base 9: mod_base = OTHER; note = guanosine-3'-phosphate
  modified_base 10: mod_base = OTHER; note = adenosine-3'-phosphate
  modified_base 11: mod_base = OTHER; note = guanosine-3'-phosphate
  modified_base 12: mod_base = OTHER; note = cytidine-3'-phosphate
  modified_base 13: mod_base = OTHER; note = adenosine-3'-phosphate
  modified_base 14: mod_base = OTHER; note = cytidine-3'-phosphate
  modified_base 15: mod_base = OTHER; note = guanosine-3'-phosphate
  modified_base 16: mod_base = OTHER; note = adenosine-3'-phosphate
  modified_base 17: mod_base = OTHER; note = adenosine-3'-phosphate
  modified_base 18: mod_base = OTHER; note = guanosine-3'-phosphate
  modified_base 19: mod_base = OTHER; note = guanosine-3'-phosphate
  misc_feature 1..19: note = RNA
  misc_feature 20..21: note = DNA
tgcacggagagcacgaaggtt

SEQ ID NO: 1181 - DNA, 21 bp, synthetic construct
  source 1..21: mol_type = other DNA
  modified_base 1: mod_base = OTHER; note = adenosine-3'-phosphate
  modified_base 2: mod_base = OTHER; note = adenosine-3'-phosphate
  modified_base 3: mod_base = OTHER; note = guanosine-3'-phosphate
  modified_base 4: mod_base = OTHER; note = adenosine-3'-phosphate
  modified_base 5: mod_base = OTHER; note = cytidine-3'-phosphate
  modified_base 6: mod_base = OTHER; note = cytidine-3'-phosphate
  modified_base 7: mod_base = OTHER; note = adenosine-3'-phosphate
  modified_base 8: mod_base = OTHER; note = cytidine-3'-phosphate
  modified_base 9: mod_base = OTHER; note = cytidine-3'-phosphate
  modified_base 10: mod_base = OTHER; note = guanosine-3'-phosphate
  modified_base 11: mod_base = OTHER; note = guanosine-3'-phosphate
  modified_base 12: mod_base = OTHER; note = cytidine-3'-phosphate
  modified_base 13: mod_base = OTHER; note = uridine-3'-phosphate
  modified_base 14: mod_base = OTHER; note = guanosine-3'-phosphate
  modified_base 15: mod_base = OTHER; note = cytidine-3'-phosphate
  modified_base 16: mod_base = OTHER; note = adenosine-3'-phosphate
  modified_base 17: mod_base = OTHER; note = cytidine-3'-phosphate
  modified_base 18: mod_base = OTHER; note = guanosine-3'-phosphate
  modified_base 19: mod_base = OTHER; note = guanosine-3'-phosphate
  misc_feature 1..19: note = RNA
  misc_feature 20..21: note = DNA
aagaccaccggctgcacggtt

SEQ ID NO: 1182 - DNA, 21 bp, synthetic construct
  source 1..21: mol_type = other DNA
  modified_base 1: mod_base = OTHER; note = cytidine-3'-phosphate
  modified_base 2: mod_base = OTHER; note = adenosine-3'-phosphate
  modified_base 3: mod_base = OTHER; note = guanosine-3'-phosphate
  modified_base 4: mod_base = OTHER; note = guanosine-3'-phosphate
  modified_base 5: mod_base = OTHER; note = cytidine-3'-phosphate
  modified_base 6: mod_base = OTHER; note = cytidine-3'-phosphate
  modified_base 7: mod_base = OTHER; note = uridine-3'-phosphate
  modified_base 8: mod_base = OTHER; note = guanosine-3'-phosphate
  modified_base 9: mod_base = OTHER; note = guanosine-3'-phosphate
  modified_base 10: mod_base = OTHER; note = adenosine-3'-phosphate
  modified_base 11: mod_base = OTHER; note = adenosine-3'-phosphate
  modified_base 12: mod_base = OTHER; note = guanosine-3'-phosphate
  modified_base 13: mod_base = OTHER; note = adenosine-3'-phosphate
  modified_base 14: mod_base = OTHER; note = cytidine-3'-phosphate
  modified_base 15: mod_base = OTHER; note = cytidine-3'-phosphate
  modified_base 16: mod_base = OTHER; note = adenosine-3'-phosphate
  modified_base 17: mod_base = OTHER; note = cytidine-3'-phosphate
  modified_base 18: mod_base = OTHER; note = cytidine-3'-phosphate
  modified_base 19: mod_base = OTHER; note = guanosine-3'-phosphate
  misc_feature 1..19: note = RNA
  misc_feature 20..21: note = DNA
caggcctggaagaccaccgtt

SEQ ID NO: 1183 - DNA, 21 bp, synthetic construct
  source 1..21: mol_type = other DNA
  modified_base 1: mod_base = OTHER; note = adenosine-3'-phosphate
  modified_base 2: mod_base = OTHER; note = guanosine-3'-phosphate
  modified_base 3: mod_base = OTHER; note = guanosine-3'-phosphate
  modified_base 4: mod_base = OTHER; note = uridine-3'-phosphate
  modified_base 5: mod_base = OTHER; note = uridine-3'-phosphate
  modified_base 6: mod_base = OTHER; note = cytidine-3'-phosphate
  modified_base 7: mod_base = OTHER; note = adenosine-3'-phosphate
  modified_base 8: mod_base = OTHER; note = cytidine-3'-phosphate
  modified_base 9: mod_base = OTHER; note = uridine-3'-phosphate
  modified_base 10: mod_base = OTHER; note = uridine-3'-phosphate
  modified_base 11: mod_base = OTHER; note = cytidine-3'-phosphate
  modified_base 12: mod_base = OTHER; note = adenosine-3'-phosphate
  modified_base 13: mod_base = OTHER; note = cytidine-3'-phosphate
  modified_base 14: mod_base = OTHER; note = adenosine-3'-phosphate
  modified_base 15: mod_base = OTHER; note = guanosine-3'-phosphate
  modified_base 16: mod_base = OTHER; note = guanosine-3'-phosphate
  modified_base 17: mod_base = OTHER; note = cytidine-3'-phosphate
  modified_base 18: mod_base = OTHER; note = cytidine-3'-phosphate
  modified_base 19: mod_base = OTHER; note = uridine-3'-phosphate
  misc_feature 1..19: note = RNA
  misc_feature 20..21: note = DNA
aggttcacttcacaggccttt

SEQ ID NO: 1184 - DNA, 21 bp, synthetic construct
  source 1..21: mol_type = other DNA
  modified_base 1: mod_base = OTHER; note = uridine-3'-phosphate
  modified_base 2: mod_base = OTHER; note = cytidine-3'-phosphate
  modified_base 3: mod_base = OTHER; note = cytidine-3'-phosphate
  modified_base 4: mod_base = OTHER; note = adenosine-3'-phosphate
  modified_base 5: mod_base = OTHER; note = guanosine-3'-phosphate
  modified_base 6: mod_base = OTHER; note = cytidine-3'-phosphate
  modified_base 7: mod_base = OTHER; note = guanosine-3'-phosphate
  modified_base 8: mod_base = OTHER; note = uridine-3'-phosphate
  modified_base 9: mod_base = OTHER; note = cytidine-3'-phosphate
  modified_base 10: mod_base = OTHER; note = adenosine-3'-phosphate
  modified_base 11: mod_base = OTHER; note = guanosine-3'-phosphate
  modified_base 12: mod_base = OTHER; note = guanosine-3'-phosphate
  modified_base 13: mod_base = OTHER; note = uridine-3'-phosphate
  modified_base 14: mod_base = OTHER; note = uridine-3'-phosphate
  modified_base 15: mod_base = OTHER; note = cytidine-3'-phosphate
  modified_base 16: mod_base = OTHER; note = adenosine-3'-phosphate
  modified_base 17: mod_base = OTHER; note = cytidine-3'-phosphate
  modified_base 18: mod_base = OTHER; note = uridine-3'-phosphate
  modified_base 19: mod_base = OTHER; note = uridine-3'-phosphate
  misc_feature 1..19: note = RNA
  misc_feature 20..21: note = DNA
tccagcgtcaggttcactttt

SEQ ID NO: 1185 - DNA, 21 bp, synthetic construct
  source 1..21: mol_type = other DNA
  modified_base 1: mod_base = OTHER; note = guanosine-3'-phosphate
  modified_base 2: mod_base = OTHER; note = adenosine-3'-phosphate
  modified_base 3: mod_base = OTHER; note = guanosine-3'-phosphate
  modified_base 4: mod_base = OTHER; note = cytidine-3'-phosphate
  modified_base 5: mod_base = OTHER; note = cytidine-3'-phosphate
  modified_base 6: mod_base = OTHER; note = uridine-3'-phosphate
  modified_base 7: mod_base = OTHER; note = guanosine-3'-phosphate
  modified_base 8: mod_base = OTHER; note = uridine-3'-phosphate
  modified_base 9: mod_base = OTHER; note = uridine-3'-phosphate
  modified_base 10: mod_base = OTHER; note = guanosine-3'-phosphate
  modified_base 11: mod_base = OTHER; note = uridine-3'-phosphate
  modified_base 12: mod_base = OTHER; note = cytidine-3'-phosphate
  modified_base 13: mod_base = OTHER; note = cytidine-3'-phosphate
  modified_base 14: mod_base = OTHER; note = adenosine-3'-phosphate
  modified_base 15: mod_base = OTHER; note = guanosine-3'-phosphate
  modified_base 16: mod_base = OTHER; note = cytidine-3'-phosphate
  modified_base 17: mod_base = OTHER; note = guanosine-3'-phosphate
  modified_base 18: mod_base = OTHER; note = uridine-3'-phosphate
  modified_base 19: mod_base = OTHER; note = cytidine-3'-phosphate
  misc_feature 1..19: note = RNA
  misc_feature 20..21: note = DNA
gagcctgttgtccagcgtctt

SEQ ID NO: 1186 - DNA, 21 bp, synthetic construct
  source 1..21: mol_type = other DNA
  modified_base 1: mod_base = OTHER; note = uridine-3'-phosphate
  modified_base 2: mod_base = OTHER; note = guanosine-3'-phosphate
  modified_base 3: mod_base = OTHER; note = guanosine-3'-phosphate
  modified_base 4: mod_base = OTHER; note = guanosine-3'-phosphate
  modified_base 5: mod_base = OTHER; note = adenosine-3'-phosphate
  modified_base 6: mod_base = OTHER; note = guanosine-3'-phosphate
  modified_base 7: mod_base = OTHER; note = uridine-3'-phosphate
  modified_base 8: mod_base = OTHER; note = cytidine-3'-phosphate
  modified_base 9: mod_base = OTHER; note = guanosine-3'-phosphate
  modified_base 10: mod_base = OTHER; note = adenosine-3'-phosphate
  modified_base 11: mod_base = OTHER; note = guanosine-3'-phosphate
  modified_base 12: mod_base = OTHER; note = cytidine-3'-phosphate
  modified_base 13: mod_base = OTHER; note = cytidine-3'-phosphate
  modified_base 14: mod_base = OTHER; note = uridine-3'-phosphate
  modified_base 15: mod_base = OTHER; note = guanosine-3'-phosphate
  modified_base 16: mod_base = OTHER; note = uridine-3'-phosphate
  modified_base 17: mod_base = OTHER; note = uridine-3'-phosphate
  modified_base 18: mod_base = OTHER; note = guanosine-3'-phosphate
  modified_base 19: mod_base = OTHER; note = uridine-3'-phosphate
  misc_feature 1..19: note = RNA
  misc_feature 20..21: note = DNA
tgggagtcgagcctgttgttt

SEQ ID NO: 1187 - DNA, 21 bp, synthetic construct
  source 1..21: mol_type = other DNA
  modified_base 1: mod_base = OTHER; note = cytidine-3'-phosphate
  modified_base 2: mod_base = OTHER; note = uridine-3'-phosphate
  modified_base 3: mod_base = OTHER; note = guanosine-3'-phosphate
  modified_base 4: mod_base = OTHER; note = adenosine-3'-phosphate
  modified_base 5: mod_base = OTHER; note = guanosine-3'-phosphate
  modified_base 6: mod_base = OTHER; note = guanosine-3'-phosphate
  modified_base 7: mod_base = OTHER; note = adenosine-3'-phosphate
  modified_base 8: mod_base = OTHER; note = cytidine-3'-phosphate
  modified_base 9: mod_base = OTHER; note = guanosine-3'-phosphate
  modified_base 10: mod_base = OTHER; note = cytidine-3'-phosphate
  modified_base 11: mod_base = OTHER; note = cytidine-3'-phosphate
  modified_base 12: mod_base = OTHER; note = cytidine-3'-phosphate
  modified_base 13: mod_base = OTHER; note = uridine-3'-phosphate
  modified_base 14: mod_base = OTHER; note = guanosine-3'-phosphate
  modified_base 15: mod_base = OTHER; note = guanosine-3'-phosphate
  modified_base 16: mod_base = OTHER; note = guanosine-3'-phosphate
  modified_base 17: mod_base = OTHER; note = adenosine-3'-phosphate
  modified_base 18: mod_base = OTHER; note = guanosine-3'-phosphate
  modified_base 19: mod_base = OTHER; note = uridine-3'-phosphate
  misc_feature 1..19: note = RNA
  misc_feature 20..21: note = DNA
ctgaggacgccctgggagttt

SEQ ID NO: 1188 - DNA, 21 bp, synthetic construct
  source 1..21: mol_type = other DNA
  modified_base 1: mod_base = OTHER; note = uridine-3'-phosphate
  modified_base 2: mod_base = OTHER; note = adenosine-3'-phosphate
  modified_base 3: mod_base = OTHER; note = guanosine-3'-phosphate
  modified_base 4: mod_base = OTHER; note = cytidine-3'-phosphate
  modified_base 5: mod_base = OTHER; note = uridine-3'-phosphate
  modified_base 6: mod_base = OTHER; note = guanosine-3'-phosphate
  modified_base 7: mod_base = OTHER; note = guanosine-3'-phosphate
  modified_base 8: mod_base = OTHER; note = guanosine-3'-phosphate
  modified_base 9: mod_base = OTHER; note = guanosine-3'-phosphate
  modified_base 10: mod_base = OTHER; note = adenosine-3'-phosphate
  modified_base 11: mod_base = OTHER; note = adenosine-3'-phosphate
  modified_base 12: mod_base = OTHER; note = guanosine-3'-phosphate
  modified_base 13: mod_base = OTHER; note = uridine-3'-phosphate
  modified_base 14: mod_base = OTHER; note = adenosine-3'-phosphate
  modified_base 15: mod_base = OTHER; note = cytidine-3'-phosphate
  modified_base 16: mod_base = OTHER; note = guanosine-3'-phosphate
  modified_base 17: mod_base = OTHER; note = guanosine-3'-phosphate
  modified_base 18: mod_base = OTHER; note = guanosine-3'-phosphate
  modified_base 19: mod_base = OTHER; note = guanosine-3'-phosphate
  misc_feature 1..19: note = RNA
  misc_feature 20..21: note = DNA
tagctggggaagtacggggtt

SEQ ID NO: 1189 - DNA, 21 bp, synthetic construct
  source 1..21: mol_type = other DNA
  modified_base 1: mod_base = OTHER; note = guanosine-3'-phosphate
  modified_base 2: mod_base = OTHER; note = cytidine-3'-phosphate
  modified_base 3: mod_base = OTHER; note = guanosine-3'-phosphate
  modified_base 4: mod_base = OTHER; note = adenosine-3'-phosphate
  modified_base 5: mod_base = OTHER; note = guanosine-3'-phosphate
  modified_base 6: mod_base = OTHER; note = uridine-3'-phosphate
  modified_base 7: mod_base = OTHER; note = adenosine-3'-phosphate
  modified_base 8: mod_base = OTHER; note = guanosine-3'-phosphate
  modified_base 9: mod_base = OTHER; note = uridine-3'-phosphate
  modified_base 10: mod_base = OTHER; note = adenosine-3'-phosphate
  modified_base 11: mod_base = OTHER; note = guanosine-3'-phosphate
  modified_base 12: mod_base = OTHER; note = cytidine-3'-phosphate
  modified_base 13: mod_base = OTHER; note = uridine-3'-phosphate
  modified_base 14: mod_base = OTHER; note = guanosine-3'-phosphate
  modified_base 15: mod_base = OTHER; note = guanosine-3'-phosphate
  modified_base 16: mod_base = OTHER; note = guanosine-3'-phosphate
  modified_base 17: mod_base = OTHER; note = guanosine-3'-phosphate
  modified_base 18: mod_base = OTHER; note = adenosine-3'-phosphate
  modified_base 19: mod_base = OTHER; note = adenosine-3'-phosphate
  misc_feature 1..19: note = RNA
  misc_feature 20..21: note = DNA
gcgagtagtagctggggaatt

SEQ ID NO: 1190 - DNA, 21 bp, synthetic construct
  source 1..21: mol_type = other DNA
  modified_base 1: mod_base = OTHER; note = uridine-3'-phosphate
  modified_base 2: mod_base = OTHER; note = guanosine-3'-phosphate
  modified_base 3: mod_base = OTHER; note = guanosine-3'-phosphate
  modified_base 4: mod_base = OTHER; note = guanosine-3'-phosphate
  modified_base 5: mod_base = OTHER; note = uridine-3'-phosphate
  modified_base 6: mod_base = OTHER; note = uridine-3'-phosphate
  modified_base 7: mod_base = OTHER; note = uridine-3'-phosphate
  modified_base 8: mod_base = OTHER; note = guanosine-3'-phosphate
  modified_base 9: mod_base = OTHER; note = guanosine-3'-phosphate
  modified_base 10: mod_base = OTHER; note = guanosine-3'-phosphate
  modified_base 11: mod_base = OTHER; note = guanosine-3'-phosphate
  modified_base 12: mod_base = OTHER; note = cytidine-3'-phosphate
  modified_base 13: mod_base = OTHER; note = guanosine-3'-phosphate
  modified_base 14: mod_base = OTHER; note = adenosine-3'-phosphate
  modified_base 15: mod_base = OTHER; note = guanosine-3'-phosphate
  modified_base 16: mod_base = OTHER; note = uridine-3'-phosphate
  modified_base 17: mod_base = OTHER; note = adenosine-3'-phosphate
  modified_base 18: mod_base = OTHER; note = guanosine-3'-phosphate
  modified_base 19: mod_base = OTHER; note = uridine-3'-phosphate
  misc_feature 1..19: note = RNA
  misc_feature 20..21: note = DNA
tgggtttggggcgagtagttt

SEQ ID NO: 1191 - DNA, 21 bp, synthetic construct
  source 1..21: mol_type = other DNA
  modified_base 1: mod_base = OTHER; note = cytidine-3'-phosphate
  modified_base 2: mod_base = OTHER; note = adenosine-3'-phosphate
  modified_base 3: mod_base = OTHER; note = guanosine-3'-phosphate
  modified_base 4: mod_base = OTHER; note = guanosine-3'-phosphate
  modified_base 5: mod_base = OTHER; note = adenosine-3'-phosphate
  modified_base 6: mod_base = OTHER; note = guanosine-3'-phosphate
  modified_base 7: mod_base = OTHER; note = cytidine-3'-phosphate
  modified_base 8: mod_base = OTHER; note = adenosine-3'-phosphate
  modified_base 9: mod_base = OTHER; note = guanosine-3'-phosphate
  modified_base 10: mod_base = OTHER; note = uridine-3'-phosphate
  modified_base 11: mod_base = OTHER; note = guanosine-3'-phosphate
  modified_base 12: mod_base = OTHER; note = guanosine-3'-phosphate
  modified_base 13: mod_base = OTHER; note = guanosine-3'-phosphate
  modified_base 14: mod_base = OTHER; note = uridine-3'-phosphate
  modified_base 15: mod_base = OTHER; note = uridine-3'-phosphate
  modified_base 16: mod_base = OTHER; note = uridine-3'-phosphate
  modified_base 17: mod_base = OTHER; note = guanosine-3'-phosphate
  modified_base 18: mod_base = OTHER; note = guanosine-3'-phosphate
  modified_base 19: mod_base = OTHER; note = guanosine-3'-phosphate
  misc_feature 1..19: note = RNA
  misc_feature 20..21: note = DNA
caggagcagtgggtttgggtt

SEQ ID NO: 1192 - DNA, 21 bp, synthetic construct
  source 1..21: mol_type = other DNA
  modified_base 1: mod_base = OTHER; note = adenosine-3'-phosphate
  modified_base 2: mod_base = OTHER; note = cytidine-3'-phosphate
  modified_base 3: mod_base = OTHER; note = cytidine-3'-phosphate
  modified_base 4: mod_base = OTHER; note = guanosine-3'-phosphate
  modified_base 5: mod_base = OTHER; note = uridine-3'-phosphate
  modified_base 6: mod_base = OTHER; note = guanosine-3'-phosphate
  modified_base 7: mod_base = OTHER; note = adenosine-3'-phosphate
  modified_base 8: mod_base = OTHER; note = guanosine-3'-phosphate
  modified_base 9: mod_base = OTHER; note = guanosine-3'-phosphate
  modified_base 10: mod_base = OTHER; note = uridine-3'-phosphate
  modified_base 11: mod_base = OTHER; note = guanosine-3'-phosphate
  modified_base 12: mod_base = OTHER; note = cytidine-3'-phosphate
  modified_base 13: mod_base = OTHER; note = cytidine-3'-phosphate
  modified_base 14: mod_base = OTHER; note = adenosine-3'-phosphate
  modified_base 15: mod_base = OTHER; note = guanosine-3'-phosphate
  modified_base 16: mod_base = OTHER; note = guanosine-3'-phosphate
  modified_base 17: mod_base = OTHER; note = adenosine-3'-phosphate
  modified_base 18: mod_base = OTHER; note = guanosine-3'-phosphate
  modified_base 19: mod_base = OTHER; note = cytidine-3'-phosphate
  misc_feature 1..19: note = RNA
  misc_feature 20..21: note = DNA
accgtgaggtgccaggagctt

SEQ ID NO: 1193 - DNA, 21 bp, synthetic construct
  source 1..21: mol_type = other DNA
  modified_base 1: mod_base = OTHER; note = adenosine-3'-phosphate
  modified_base 2: mod_base = OTHER; note = guanosine-3'-phosphate
  modified_base 3: mod_base = OTHER; note = adenosine-3'-phosphate
  modified_base 4: mod_base = OTHER; note = guanosine-3'-phosphate
  modified_base 5: mod_base = OTHER; note = adenosine-3'-phosphate
  modified_base 6: mod_base = OTHER; note = guanosine-3'-phosphate
  modified_base 7: mod_base = OTHER; note = guanosine-3'-phosphate
  modified_base 8: mod_base = OTHER; note = guanosine-3'-phosphate
  modified_base 9: mod_base = OTHER; note = cytidine-3'-phosphate
  modified_base 10: mod_base = OTHER; note = adenosine-3'-phosphate
  modified_base 11: mod_base = OTHER; note = cytidine-3'-phosphate
  modified_base 12: mod_base = OTHER; note = cytidine-3'-phosphate
  modified_base 13: mod_base = OTHER; note = guanosine-3'-phosphate
  modified_base 14: mod_base = OTHER; note = uridine-3'-phosphate
  modified_base 15: mod_base = OTHER; note = guanosine-3'-phosphate
  modified_base 16: mod_base = OTHER; note = adenosine-3'-phosphate
  modified_base 17: mod_base = OTHER; note = guanosine-3'-phosphate
  modified_base 18: mod_base = OTHER; note = guanosine-3'-phosphate
  modified_base 19: mod_base = OTHER; note = uridine-3'-phosphate
  misc_feature 1..19: note = RNA
  misc_feature 20..21: note = DNA
agagagggcaccgtgaggttt

SEQ ID NO: 1194 - DNA, 21 bp, synthetic construct
  source 1..21: mol_type = other DNA
  modified_base 1: mod_base = OTHER; note = cytidine-3'-phosphate
  modified_base 2: mod_base = OTHER; note = adenosine-3'-phosphate
  modified_base 3: mod_base = OTHER; note = adenosine-3'-phosphate
  modified_base 4: mod_base = OTHER; note = guanosine-3'-phosphate
  modified_base 5: mod_base = OTHER; note = cytidine-3'-phosphate
  modified_base 6: mod_base = OTHER; note = cytidine-3'-phosphate
  modified_base 7: mod_base = OTHER; note = guanosine-3'-phosphate
  modified_base 8: mod_base = OTHER; note = uridine-3'-phosphate
  modified_base 9: mod_base = OTHER; note = adenosine-3'-phosphate
  modified_base 10: mod_base = OTHER; note = guanosine-3'-phosphate
  modified_base 11: mod_base = OTHER; note = uridine-3'-phosphate
  modified_base 12: mod_base = OTHER; note = cytidine-3'-phosphate
  modified_base 13: mod_base = OTHER; note = cytidine-3'-phosphate
  modified_base 14: mod_base = OTHER; note = adenosine-3'-phosphate
  modified_base 15: mod_base = OTHER; note = guanosine-3'-phosphate
  modified_base 16: mod_base = OTHER; note = adenosine-3'-phosphate
  modified_base 17: mod_base = OTHER; note = guanosine-3'-phosphate
  modified_base 18: mod_base = OTHER; note = adenosine-3'-phosphate
  modified_base 19: mod_base = OTHER; note = guanosine-3'-phosphate
  misc_feature 1..19: note = RNA
  misc_feature 20..21: note = DNA
caagccgtagtccagagagtt

SEQ ID NO: 1195 - DNA, 21 bp, synthetic construct
  source 1..21: mol_type = other DNA
  modified_base 1: mod_base = OTHER; note = adenosine-3'-phosphate
  modified_base 2: mod_base = OTHER; note = guanosine-3'-phosphate
  modified_base 3: mod_base = OTHER; note = adenosine-3'-phosphate
  modified_base 4: mod_base = OTHER; note = guanosine-3'-phosphate
  modified_base 5: mod_base = OTHER; note = guanosine-3'-phosphate
  modified_base 6: mod_base = OTHER; note = guanosine-3'-phosphate
  modified_base 7: mod_base = OTHER; note = cytidine-3'-phosphate
  modified_base 8: mod_base = OTHER; note = cytidine-3'-phosphate
  modified_base 9: mod_base = OTHER; note = adenosine-3'-phosphate
  modified_base 10: mod_base = OTHER; note = adenosine-3'-phosphate
  modified_base 11: mod_base = OTHER; note = guanosine-3'-phosphate
  modified_base 12: mod_base = OTHER; note = cytidine-3'-phosphate
  modified_base 13: mod_base = OTHER; note = cytidine-3'-phosphate
  modified_base 14: mod_base = OTHER; note = guanosine-3'-phosphate
  modified_base 15: mod_base = OTHER; note = uridine-3'-phosphate
  modified_base 16: mod_base = OTHER; note = adenosine-3'-phosphate
  modified_base 17: mod_base = OTHER; note = guanosine-3'-phosphate
  modified_base 18: mod_base = OTHER; note = uridine-3'-phosphate
  modified_base 19: mod_base = OTHER; note = cytidine-3'-phosphate
  misc_feature 1..19: note = RNA
  misc_feature 20..21: note = DNA
agagggccaagccgtagtctt

SEQ ID NO: 1196 - DNA, 21 bp, synthetic construct
  source 1..21: mol_type = other DNA
  modified_base 1: mod_base = OTHER; note = uridine-3'-phosphate
  modified_base 2: mod_base = OTHER; note = adenosine-3'-phosphate
  modified_base 3: mod_base = OTHER; note = guanosine-3'-phosphate
  modified_base 4: mod_base = OTHER; note = guanosine-3'-phosphate
  modified_base 5: mod_base = OTHER; note = cytidine-3'-phosphate
  modified_base 6: mod_base = OTHER; note = adenosine-3'-phosphate
  modified_base 7: mod_base = OTHER; note = uridine-3'-phosphate
  modified_base 8: mod_base = OTHER; note = cytidine-3'-phosphate
  modified_base 9: mod_base = OTHER; note = adenosine-3'-phosphate
  modified_base 10: mod_base = OTHER; note = adenosine-3'-phosphate
  modified_base 11: mod_base = OTHER; note = adenosine-3'-phosphate
  modified_base 12: mod_base = OTHER; note = cytidine-3'-phosphate
  modified_base 13: mod_base = OTHER; note = cytidine-3'-phosphate
  modified_base 14: mod_base = OTHER; note = adenosine-3'-phosphate
  modified_base 15: mod_base = OTHER; note = guanosine-3'-phosphate
  modified_base 16: mod_base = OTHER; note = adenosine-3'-phosphate
  modified_base 17: mod_base = OTHER; note = guanosine-3'-phosphate
  modified_base 18: mod_base = OTHER; note = guanosine-3'-phosphate
  modified_base 19: mod_base = OTHER; note = guanosine-3'-phosphate
  misc_feature 1..19: note = RNA
  misc_feature 20..21: note = DNA
taggcatcaaaccagagggtt

SEQ ID NO: 1197 - DNA, 21 bp, synthetic construct
  source 1..21: mol_type = other DNA
  modified_base 1: mod_base = OTHER; note = cytidine-3'-phosphate
  modified_base 2: mod_base = OTHER; note = adenosine-3'-phosphate
  modified_base 3: mod_base = OTHER; note = guanosine-3'-phosphate
  modified_base 4: mod_base = OTHER; note = uridine-3'-phosphate
  modified_base 5: mod_base = OTHER; note = guanosine-3'-phosphate
  modified_base 6: mod_base = OTHER; note = cytidine-3'-phosphate
  modified_base 7: mod_base = OTHER; note = adenosine-3'-phosphate
  modified_base 8: mod_base = OTHER; note = uridine-3'-phosphate
  modified_base 9: mod_base = OTHER; note = adenosine-3'-phosphate
  modified_base 10: mod_base = OTHER; note = guanosine-3'-phosphate
  modified_base 11: mod_base = OTHER; note = guanosine-3'-phosphate
  modified_base 12: mod_base = OTHER; note = cytidine-3'-phosphate
  modified_base 13: mod_base = OTHER; note = adenosine-3'-phosphate
  modified_base 14: mod_base = OTHER; note = uridine-3'-phosphate
  modified_base 15: mod_base = OTHER; note = cytidine-3'-phosphate
  modified_base 16: mod_base = OTHER; note = adenosine-3'-phosphate
  modified_base 17: mod_base = OTHER; note = adenosine-3'-phosphate
  modified_base 18: mod_base = OTHER; note = adenosine-3'-phosphate
  modified_base 19: mod_base = OTHER; note = cytidine-3'-phosphate
  misc_feature 1..19: note = RNA
  misc_feature 20..21: note = DNA
cagtgcataggcatcaaactt

SEQ ID NO: 1198 - DNA, 21 bp, synthetic construct
  source 1..21: mol_type = other DNA
  modified_base 1: mod_base = OTHER; note = adenosine-3'-phosphate
  modified_base 2: mod_base = OTHER; note = cytidine-3'-phosphate
  modified_base 3: mod_base = OTHER; note = uridine-3'-phosphate
  modified_base 4: mod_base = OTHER; note = uridine-3'-phosphate
  modified_base 5: mod_base = OTHER; note = cytidine-3'-phosphate
  modified_base 6: mod_base = OTHER; note = uridine-3'-phosphate
  modified_base 7: mod_base = OTHER; note = guanosine-3'-phosphate
  modified_base 8: mod_base = OTHER; note = cytidine-3'-phosphate
  modified_base 9: mod_base = OTHER; note = cytidine-3'-phosphate
  modified_base 10: mod_base = OTHER; note = uridine-3'-phosphate
  modified_base 11: mod_base = OTHER; note = cytidine-3'-phosphate
  modified_base 12: mod_base = OTHER; note = cytidine-3'-phosphate
  modified_base 13: mod_base = OTHER; note = uridine-3'-phosphate
  modified_base 14: mod_base = OTHER; note = cytidine-3'-phosphate
  modified_base 15: mod_base = OTHER; note = adenosine-3'-phosphate
  modified_base 16: mod_base = OTHER; note = guanosine-3'-phosphate
  modified_base 17: mod_base = OTHER; note = uridine-3'-phosphate
  modified_base 18: mod_base = OTHER; note = guanosine-3'-phosphate
  modified_base 19: mod_base = OTHER; note = cytidine-3'-phosphate
  misc_feature 1..19: note = RNA
  misc_feature 20..21: note = DNA
acttctgcctcctcagtgctt

SEQ ID NO: 1199 - DNA, 21 bp, synthetic construct
  source 1..21: mol_type = other DNA
  modified_base 1: mod_base = OTHER; note = adenosine-3'-phosphate
  modified_base 2: mod_base = OTHER; note = adenosine-3'-phosphate
  modified_base 3: mod_base = OTHER; note = adenosine-3'-phosphate
  modified_base 4: mod_base = OTHER; note = uridine-3'-phosphate
  modified_base 5: mod_base = OTHER; note = cytidine-3'-phosphate
  modified_base 6: mod_base = OTHER; note = adenosine-3'-phosphate
  modified_base 7: mod_base = OTHER; note = uridine-3'-phosphate
  modified_base 8: mod_base = OTHER; note = adenosine-3'-phosphate
  modified_base 9: mod_base = OTHER; note = cytidine-3'-phosphate
  modified_base 10: mod_base = OTHER; note = uridine-3'-phosphate
  modified_base 11: mod_base = OTHER; note = uridine-3'-phosphate
  modified_base 12: mod_base = OTHER; note = cytidine-3'-phosphate
  modified_base 13: mod_base = OTHER; note = uridine-3'-phosphate
  modified_base 14: mod_base = OTHER; note = guanosine-3'-phosphate
  modified_base 15: mod_base = OTHER; note = cytidine-3'-phosphate
  modified_base 16: mod_base = OTHER; note = cytidine-3'-phosphate
  modified_base 17: mod_base = OTHER; note = uridine-3'-phosphate
  modified_base 18: mod_base = OTHER; note = cytidine-3'-phosphate
  modified_base 19: mod_base = OTHER; note = cytidine-3'-phosphate
  misc_feature 1..19: note = RNA
  misc_feature 20..21: note = DNA
aaatcatacttctgcctcctt

SEQ ID NO: 1200 - DNA, 21 bp, synthetic construct
  source 1..21: mol_type = other DNA
  modified_base 1: mod_base = OTHER; note = uridine-3'-phosphate
  modified_base 2: mod_base = OTHER; note = guanosine-3'-phosphate
  modified_base 3: mod_base = OTHER; note = guanosine-3'-phosphate
  modified_base 4: mod_base = OTHER; note = guanosine-3'-phosphate
  modified_base 5: mod_base = OTHER; note = uridine-3'-phosphate
  modified_base 6: mod_base = OTHER; note = guanosine-3'-phosphate
  modified_base 7: mod_base = OTHER; note = cytidine-3'-phosphate
  modified_base 8: mod_base = OTHER; note = adenosine-3'-phosphate
  modified_base 9: mod_base = OTHER; note = cytidine-3'-phosphate
  modified_base 10: mod_base = OTHER; note = guanosine-3'-phosphate
  modified_base 11: mod_base = OTHER; note = guanosine-3'-phosphate
  modified_base 12: mod_base = OTHER; note = cytidine-3'-phosphate
  modified_base 13: mod_base = OTHER; note = adenosine-3'-phosphate
  modified_base 14: mod_base = OTHER; note = adenosine-3'-phosphate
  modified_base 15: mod_base = OTHER; note = adenosine-3'-phosphate
  modified_base 16: mod_base = OTHER; note = uridine-3'-phosphate
  modified_base 17: mod_base = OTHER; note = cytidine-3'-phosphate
  modified_base 18: mod_base = OTHER; note = adenosine-3'-phosphate
  modified_base 19: mod_base = OTHER; note = uridine-3'-phosphate
  misc_feature 1..19: note = RNA
  misc_feature 20..21: note = DNA
tgggtgcacggcaaatcattt

SEQ ID NO: 1201 - DNA, 21 bp, synthetic construct
  source 1..21: mol_type = other DNA
  modified_base 1: mod_base = OTHER; note = uridine-3'-phosphate
  modified_base 2: mod_base = OTHER; note = cytidine-3'-phosphate
  modified_base 3: mod_base = OTHER; note = cytidine-3'-phosphate
  modified_base 4: mod_base = OTHER; note = adenosine-3'-phosphate
  modified_base 5: mod_base = OTHER; note = cytidine-3'-phosphate
  modified_base 6: mod_base = OTHER; note = uridine-3'-phosphate
  modified_base 7: mod_base = OTHER; note = guanosine-3'-phosphate
  modified_base 8: mod_base = OTHER; note = guanosine-3'-phosphate
  modified_base 9: mod_base = OTHER; note = cytidine-3'-phosphate
  modified_base 10: mod_base = OTHER; note = cytidine-3'-phosphate
  modified_base 11: mod_base = OTHER; note = cytidine-3'-phosphate
  modified_base 12: mod_base = OTHER; note = uridine-3'-phosphate
  modified_base 13: mod_base = OTHER; note = guanosine-3'-phosphate
  modified_base 14: mod_base = OTHER; note = guanosine-3'-phosphate
  modified_base 15: mod_base = OTHER; note = guanosine-3'-phosphate
  modified_base 16: mod_base = OTHER; note = uridine-3'-phosphate
  modified_base 17: mod_base = OTHER; note = guanosine-3'-phosphate
  modified_base 18: mod_base = OTHER; note = cytidine-3'-phosphate
  modified_base 19: mod_base = OTHER; note = adenosine-3'-phosphate
  misc_feature 1..19: note = RNA
  misc_feature 20..21: note = DNA
tccactggccctgggtgcatt

SEQ ID NO: 1202 - DNA, 21 bp, synthetic construct
  source 1..21: mol_type = other DNA
  modified_base 1: mod_base = OTHER; note = uridine-3'-phosphate
  modified_base 2: mod_base = OTHER; note = uridine-3'-phosphate
  modified_base 3: mod_base = OTHER; note = cytidine-3'-phosphate
  modified_base 4: mod_base = OTHER; note = uridine-3'-phosphate
  modified_base 5: mod_base = OTHER; note = guanosine-3'-phosphate
  modified_base 6: mod_base = OTHER; note = guanosine-3'-phosphate
  modified_base 7: mod_base = OTHER; note = adenosine-3'-phosphate
  modified_base 8: mod_base = OTHER; note = uridine-3'-phosphate
  modified_base 9: mod_base = OTHER; note = cytidine-3'-phosphate
  modified_base 10: mod_base = OTHER; note = guanosine-3'-phosphate
  modified_base 11: mod_base = OTHER; note = uridine-3'-phosphate
  modified_base 12: mod_base = OTHER; note = cytidine-3'-phosphate
  modified_base 13: mod_base = OTHER; note = cytidine-3'-phosphate
  modified_base 14: mod_base = OTHER; note = adenosine-3'-phosphate
  modified_base 15: mod_base = OTHER; note = cytidine-3'-phosphate
  modified_base 16: mod_base = OTHER; note = uridine-3'-phosphate
  modified_base 17: mod_base = OTHER; note = guanosine-3'-phosphate
  modified_base 18: mod_base = OTHER; note = guanosine-3'-phosphate
  modified_base 19: mod_base = OTHER; note = cytidine-3'-phosphate
  misc_feature 1..19: note = RNA
  misc_feature 20..21: note = DNA
ttctggatcgtccactggctt

SEQ ID NO: 1203 - DNA, 21 bp, synthetic construct
  source 1..21: mol_type = other DNA
  modified_base 1: mod_base = OTHER; note = cytidine-3'-phosphate
  modified_base 2: mod_base = OTHER; note = uridine-3'-phosphate
  modified_base 3: mod_base = OTHER; note = cytidine-3'-phosphate
  modified_base 4: mod_base = OTHER; note = cytidine-3'-phosphate
  modified_base 5: mod_base = OTHER; note = uridine-3'-phosphate
  modified_base 6: mod_base = OTHER; note = guanosine-3'-phosphate
  modified_base 7: mod_base = OTHER; note = uridine-3'-phosphate
  modified_base 8: mod_base = OTHER; note = uridine-3'-phosphate
  modified_base 9: mod_base = OTHER; note = cytidine-3'-phosphate
  modified_base 10: mod_base = OTHER; note = uridine-3'-phosphate
  modified_base 11: mod_base = OTHER; note = guanosine-3'-phosphate
  modified_base 12: mod_base = OTHER; note = guanosine-3'-phosphate
  modified_base 13: mod_base = OTHER; note = adenosine-3'-phosphate
  modified_base 14: mod_base = OTHER; note = uridine-3'-phosphate
  modified_base 15: mod_base = OTHER; note = cytidine-3'-phosphate
  modified_base 16: mod_base = OTHER; note = guanosine-3'-phosphate
  modified_base 17: mod_base = OTHER; note = uridine-3'-phosphate
  modified_base 18: mod_base = OTHER; note = cytidine-3'-phosphate
  modified_base 19: mod_base = OTHER; note = cytidine-3'-phosphate
  misc_feature 1..19: note = RNA
  misc_feature 20..21: note = DNA
ctcctgttctggatcgtcctt

SEQ ID NO: 1204 - DNA, 21 bp, synthetic construct
  source 1..21: mol_type = other DNA
  modified_base 1: mod_base = OTHER; note = adenosine-3'-phosphate
  modified_base 2: mod_base = OTHER; note = adenosine-3'-phosphate
  modified_base 3: mod_base = OTHER; note = guanosine-3'-phosphate
  modified_base 4: mod_base = OTHER; note = cytidine-3'-phosphate
  modified_base 5: mod_base = OTHER; note = cytidine-3'-phosphate
  modified_base 6: mod_base = OTHER; note = adenosine-3'-phosphate
  modified_base 7: mod_base = OTHER; note = cytidine-3'-phosphate
  modified_base 8: mod_base = OTHER; note = adenosine-3'-phosphate
  modified_base 9: mod_base = OTHER; note = cytidine-3'-phosphate
  modified_base 10: mod_base = OTHER; note = adenosine-3'-phosphate
  modified_base 11: mod_base = OTHER; note = guanosine-3'-phosphate
  modified_base 12: mod_base = OTHER; note = cytidine-3'-phosphate
  modified_base 13: mod_base = OTHER; note = cytidine-3'-phosphate
  modified_base 14: mod_base = OTHER; note = uridine-3'-phosphate
  modified_base 15: mod_base = OTHER; note = cytidine-3'-phosphate
  modified_base 16: mod_base = OTHER; note = cytidine-3'-phosphate
  modified_base 17: mod_base = OTHER; note = uridine-3'-phosphate
  modified_base 18: mod_base = OTHER; note = guanosine-3'-phosphate
  modified_base 19: mod_base = OTHER; note = uridine-3'-phosphate
  misc_feature 1..19: note = RNA
  misc_feature 20..21: note = DNA
aagccacacagcctcctgttt

SEQ ID NO: 1205 - DNA, 21 bp, synthetic construct
  source 1..21: mol_type = other DNA
  modified_base 1: mod_base = OTHER; note = guanosine-3'-phosphate
  modified_base 2: mod_base = OTHER; note = guanosine-3'-phosphate
  modified_base 3: mod_base = OTHER; note = adenosine-3'-phosphate
  modified_base 4: mod_base = OTHER; note = uridine-3'-phosphate
  modified_base 5: mod_base = OTHER; note = guanosine-3'-phosphate
  modified_base 6: mod_base = OTHER; note = cytidine-3'-phosphate
  modified_base 7: mod_base = OTHER; note = guanosine-3'-phosphate
  modified_base 8: mod_base = OTHER; note = cytidine-3'-phosphate
  modified_base 9: mod_base = OTHER; note = adenosine-3'-phosphate
  modified_base 10: mod_base = OTHER; note = adenosine-3'-phosphate
  modified_base 11: mod_base = OTHER; note = guanosine-3'-phosphate
  modified_base 12: mod_base = OTHER; note = cytidine-3'-phosphate
  modified_base 13: mod_base = OTHER; note = cytidine-3'-phosphate
  modified_base 14: mod_base = OTHER; note = adenosine-3'-phosphate
  modified_base 15: mod_base = OTHER; note = cytidine-3'-phosphate
  modified_base 16: mod_base = OTHER; note = adenosine-3'-phosphate
  modified_base 17: mod_base = OTHER; note = cytidine-3'-phosphate
  modified_base 18: mod_base = OTHER; note = adenosine-3'-phosphate
  modified_base 19: mod_base = OTHER; note = guanosine-3'-phosphate
  misc_feature 1..19: note = RNA
  misc_feature 20..21: note = DNA
ggatgcgcaagccacacagtt

SEQ ID NO: 1206 - DNA, 21 bp, synthetic construct
  source 1..21: mol_type = other DNA
  modified_base 1: mod_base = OTHER; note = uridine-3'-phosphate
  modified_base 2: mod_base = OTHER; note = adenosine-3'-phosphate
  modified_base 3: mod_base = OTHER; note = guanosine-3'-phosphate
  modified_base 4: mod_base = OTHER; note = guanosine-3'-phosphate
  modified_base 5: mod_base = OTHER; note = guanosine-3'-phosphate
  modified_base 6: mod_base = OTHER; note = cytidine-3'-phosphate
  modified_base 7: mod_base = OTHER; note = uridine-3'-phosphate
  modified_base 8: mod_base = OTHER; note = guanosine-3'-phosphate
  modified_base 9: mod_base = OTHER; note = cytidine-3'-phosphate
  modified_base 10: mod_base = OTHER; note = adenosine-3'-phosphate
  modified_base 11: mod_base = OTHER; note = guanosine-3'-phosphate
  modified_base 12: mod_base = OTHER; note = guanosine-3'-phosphate
  modified_base 13: mod_base = OTHER; note = adenosine-3'-phosphate
  modified_base 14: mod_base = OTHER; note = uridine-3'-phosphate
  modified_base 15: mod_base = OTHER; note = guanosine-3'-phosphate
  modified_base 16: mod_base = OTHER; note = cytidine-3'-phosphate
  modified_base 17: mod_base = OTHER; note = guanosine-3'-phosphate
  modified_base 18: mod_base = OTHER; note = cytidine-3'-phosphate
  modified_base 19: mod_base = OTHER; note = adenosine-3'-phosphate
  misc_feature 1..19: note = RNA
  misc_feature 20..21: note = DNA
tagggctgcaggatgcgcatt

SEQ ID NO: 1207 - DNA, 21 bp, synthetic construct
  source 1..21: mol_type = other DNA
  modified_base 1: mod_base = OTHER; note = adenosine-3'-phosphate
  modified_base 2: mod_base = OTHER; note = uridine-3'-phosphate
  modified_base 3: mod_base = OTHER; note = cytidine-3'-phosphate
  modified_base 4: mod_base = OTHER; note = cytidine-3'-phosphate
  modified_base 5: mod_base = OTHER; note = uridine-3'-phosphate
  modified_base 6: mod_base = OTHER; note = cytidine-3'-phosphate
  modified_base 7: mod_base = OTHER; note = uridine-3'-phosphate
  modified_base 8: mod_base = OTHER; note = cytidine-3'-phosphate
  modified_base 9: mod_base = OTHER; note = guanosine-3'-phosphate
  modified_base 10: mod_base = OTHER; note = guanosine-3'-phosphate
  modified_base 11: mod_base = OTHER; note = cytidine-3'-phosphate
  modified_base 12: mod_base = OTHER; note = guanosine-3'-phosphate
  modified_base 13: mod_base = OTHER; note = uridine-3'-phosphate
  modified_base 14: mod_base = OTHER; note = adenosine-3'-phosphate
  modified_base 15: mod_base = OTHER; note = guanosine-3'-phosphate
  modified_base 16: mod_base = OTHER; note = guanosine-3'-phosphate
  modified_base 17: mod_base = OTHER; note = guanosine-3'-phosphate
  modified_base 18: mod_base = OTHER; note = cytidine-3'-phosphate
  modified_base 19: mod_base = OTHER; note = uridine-3'-phosphate
  misc_feature 1..19: note = RNA
  misc_feature 20..21: note = DNA
atcctctcggcgtagggcttt

SEQ ID NO: 1208 - DNA, 21 bp, synthetic construct
  source 1..21: mol_type = other DNA
  modified_base 1: mod_base = OTHER; note = adenosine-3'-phosphate
  modified_base 2: mod_base = OTHER; note = cytidine-3'-phosphate
  modified_base 3: mod_base = OTHER; note = cytidine-3'-phosphate
  modified_base 4: mod_base = OTHER; note = adenosine-3'-phosphate
  modified_base 5: mod_base = OTHER; note = cytidine-3'-phosphate
  modified_base 6: mod_base = OTHER; note = guanosine-3'-phosphate
  modified_base 7: mod_base = OTHER; note = guanosine-3'-phosphate
  modified_base 8: mod_base = OTHER; note = guanosine-3'-phosphate
  modified_base 9: mod_base = OTHER; note = guanosine-3'-phosphate
  modified_base 10: mod_base = OTHER; note = adenosine-3'-phosphate
  modified_base 11: mod_base = OTHER; note = uridine-3'-phosphate
  modified_base 12: mod_base = OTHER; note = cytidine-3'-phosphate
  modified_base 13: mod_base = OTHER; note = cytidine-3'-phosphate
  modified_base 14: mod_base = OTHER; note = uridine-3'-phosphate
  modified_base 15: mod_base = OTHER; note = cytidine-3'-phosphate
  modified_base 16: mod_base = OTHER; note = uridine-3'-phosphate
  modified_base 17: mod_base = OTHER; note = cytidine-3'-phosphate
  modified_base 18: mod_base = OTHER; note = guanosine-3'-phosphate
  modified_base 19: mod_base = OTHER; note = guanosine-3'-phosphate
  misc_feature 1..19: note = RNA
  misc_feature 20..21: note = DNA
accacggggatcctctcggtt

SEQ ID NO: 1209 - DNA, 21 bp, synthetic construct
  source 1..21: mol_type = other DNA
  modified_base 1: mod_base = OTHER; note = cytidine-3'-phosphate
  modified_base 2: mod_base = OTHER; note = cytidine-3'-phosphate
  modified_base 3: mod_base = OTHER; note = guanosine-3'-phosphate
  modified_base 4: mod_base = OTHER; note = guanosine-3'-phosphate
  modified_base 5: mod_base = OTHER; note = cytidine-3'-phosphate
  modified_base 6: mod_base = OTHER; note = cytidine-3'-phosphate
  modified_base 7: mod_base = OTHER; note = guanosine-3'-phosphate
  modified_base 8: mod_base = OTHER; note = uridine-3'-phosphate
  modified_base 9: mod_base = OTHER; note = guanosine-3'-phosphate
  modified_base 10: mod_base = OTHER; note = guanosine-3'-phosphate
  modified_base 11: mod_base = OTHER; note = cytidine-3'-phosphate
  modified_base 12: mod_base = OTHER; note = cytidine-3'-phosphate
  modified_base 13: mod_base = OTHER; note = adenosine-3'-phosphate
  modified_base 14: mod_base = OTHER; note = cytidine-3'-phosphate
  modified_base 15: mod_base = OTHER; note = cytidine-3'-phosphate
  modified_base 16: mod_base = OTHER; note = adenosine-3'-phosphate
  modified_base 17: mod_base = OTHER; note = cytidine-3'-phosphate
  modified_base 18: mod_base = OTHER; note = guanosine-3'-phosphate
  modified_base 19: mod_base = OTHER; note = guanosine-3'-phosphate
  misc_feature 1..19: note = RNA
  misc_feature 20..21: note = DNA
ccggccgtggccaccacggtt

SEQ ID NO: 1210 - DNA, 21 bp, synthetic construct
  source 1..21: mol_type = other DNA
  modified_base 1: mod_base = OTHER; note = adenosine-3'-phosphate
  modified_base 2: mod_base = OTHER; note = uridine-3'-phosphate
  modified_base 3: mod_base = OTHER; note = guanosine-3'-phosphate
  modified_base 4: mod_base = OTHER; note = guanosine-3'-phosphate
  modified_base 5: mod_base = OTHER; note = uridine-3'-phosphate
  modified_base 6: mod_base = OTHER; note = guanosine-3'-phosphate
  modified_base 7: mod_base = OTHER; note = adenosine-3'-phosphate
  modified_base 8: mod_base = OTHER; note = uridine-3'-phosphate
  modified_base 9: mod_base = OTHER; note = cytidine-3'-phosphate
  modified_base 10: mod_base = OTHER; note = cytidine-3'-phosphate
  modified_base 11: mod_base = OTHER; note = cytidine-3'-phosphate
  modified_base 12: mod_base = OTHER; note = guanosine-3'-phosphate
  modified_base 13: mod_base = OTHER; note = guanosine-3'-phosphate
  modified_base 14: mod_base = OTHER; note = cytidine-3'-phosphate
  modified_base 15: mod_base = OTHER; note = cytidine-3'-phosphate
  modified_base 16: mod_base = OTHER; note = guanosine-3'-phosphate
  modified_base 17: mod_base = OTHER; note = uridine-3'-phosphate
  modified_base 18: mod_base = OTHER; note = guanosine-3'-phosphate
  modified_base 19: mod_base = OTHER; note = guanosine-3'-phosphate
  misc_feature 1..19: note = RNA
  misc_feature 20..21: note = DNA
atggtgatcccggccgtggtt

SEQ ID NO: 1211 - DNA, 21 bp, synthetic construct
  source 1..21: mol_type = other DNA
  modified_base 1: mod_base = OTHER; note = guanosine-3'-phosphate
  modified_base 2: mod_base = OTHER; note = uridine-3'-phosphate
  modified_base 3: mod_base = OTHER; note = guanosine-3'-phosphate
  modified_base 4: mod_base = OTHER; note = adenosine-3'-phosphate
  modified_base 5: mod_base = OTHER; note = adenosine-3'-phosphate
  modified_base 6: mod_base = OTHER; note = guanosine-3'-phosphate
  modified_base 7: mod_base = OTHER; note = uridine-3'-phosphate
  modified_base 8: mod_base = OTHER; note = uridine-3'-phosphate
  modified_base 9: mod_base = OTHER; note = guanosine-3'-phosphate
  modified_base 10: mod_base = OTHER; note = adenosine-3'-phosphate
  modified_base 11: mod_base = OTHER; note = uridine-3'-phosphate
  modified_base 12: mod_base = OTHER; note = guanosine-3'-phosphate
  modified_base 13: mod_base = OTHER; note = guanosine-3'-phosphate
  modified_base 14: mod_base = OTHER; note = uridine-3'-phosphate
  modified_base 15: mod_base = OTHER; note = guanosine-3'-phosphate
  modified_base 16: mod_base = OTHER; note = adenosine-3'-phosphate
  modified_base 17: mod_base = OTHER; note = uridine-3'-phosphate
  modified_base 18: mod_base = OTHER; note = cytidine-3'-phosphate
  modified_base 19: mod_base = OTHER; note = cytidine-3'-phosphate
  misc_feature 1..19: note = RNA
  misc_feature 20..21: note = DNA
gtgaagttgatggtgatcctt

SEQ ID NO: 1212 - DNA, 21 bp, synthetic construct
  source 1..21: mol_type = other DNA
  modified_base 1: mod_base = OTHER; note = adenosine-3'-phosphate
  modified_base 2: mod_base = OTHER; note = uridine-3'-phosphate
  modified_base 3: mod_base = OTHER; note = cytidine-3'-phosphate
  modified_base 4: mod_base = OTHER; note = uridine-3'-phosphate
  modified_base 5: mod_base = OTHER; note = guanosine-3'-phosphate
  modified_base 6: mod_base = OTHER; note = guanosine-3'-phosphate
  modified_base 7: mod_base = OTHER; note = guanosine-3'-phosphate
  modified_base 8: mod_base = OTHER; note = adenosine-3'-phosphate
  modified_base 9: mod_base = OTHER; note = guanosine-3'-phosphate
  modified_base 10: mod_base = OTHER; note = guanosine-3'-phosphate
  modified_base 11: mod_base = OTHER; note = uridine-3'-phosphate
  modified_base 12: mod_base = OTHER; note = guanosine-3'-phosphate
  modified_base 13: mod_base = OTHER; note = adenosine-3'-phosphate
  modified_base 14: mod_base = OTHER; note = adenosine-3'-phosphate
  modified_base 15: mod_base = OTHER; note = guanosine-3'-phosphate
  modified_base 16: mod_base = OTHER; note = uridine-3'-phosphate
  modified_base 17: mod_base = OTHER; note = uridine-3'-phosphate
  modified_base 18: mod_base = OTHER; note = guanosine-3'-phosphate
  modified_base 19: mod_base = OTHER; note = adenosine-3'-phosphate
  misc_feature 1..19: note = RNA
  misc_feature 20..21: note = DNA
atctgggaggtgaagttgatt

SEQ ID NO: 1213 - DNA, 21 bp, synthetic construct
  source 1..21: mol_type = other DNA
  modified_base 1: mod_base = OTHER; note = cytidine-3'-phosphate
  modified_base 2: mod_base = OTHER; note = cytidine-3'-phosphate
  modified_base 3: mod_base = OTHER; note = guanosine-3'-phosphate
  modified_base 4: mod_base = OTHER; note = guanosine-3'-phosphate
  modified_base 5: mod_base = OTHER; note = uridine-3'-phosphate
  modified_base 6: mod_base = OTHER; note = guanosine-3'-phosphate
  modified_base 7: mod_base = OTHER; note = adenosine-3'-phosphate
  modified_base 8: mod_base = OTHER; note = guanosine-3'-phosphate
  modified_base 9: mod_base = OTHER; note = guanosine-3'-phosphate
  modified_base 10: mod_base = OTHER; note = guanosine-3'-phosphate
  modified_base 11: mod_base = OTHER; note = adenosine-3'-phosphate
  modified_base 12: mod_base = OTHER; note = guanosine-3'-phosphate
  modified_base 13: mod_base = OTHER; note = adenosine-3'-phosphate
  modified_base 14: mod_base = OTHER; note = uridine-3'-phosphate
  modified_base 15: mod_base = OTHER; note = cytidine-3'-phosphate
  modified_base 16: mod_base = OTHER; note = uridine-3'-phosphate
  modified_base 17: mod_base = OTHER; note = guanosine-3'-phosphate
  modified_base 18: mod_base = OTHER; note = guanosine-3'-phosphate
  modified_base 19: mod_base = OTHER; note = guanosine-3'-phosphate
  misc_feature 1..19: note = RNA
  misc_feature 20..21: note = DNA
ccggtgagggagatctgggtt

SEQ ID NO: 1214 - DNA, 21 bp, synthetic construct
  source 1..21: mol_type = other DNA
  modified_base 1: mod_base = OTHER; note = adenosine-3'-phosphate
  modified_base 2: mod_base = OTHER; note = cytidine-3'-phosphate
  modified_base 3: mod_base = OTHER; note = adenosine-3'-phosphate
  modified_base 4: mod_base = OTHER; note = cytidine-3'-phosphate
  modified_base 5: mod_base = OTHER; note = cytidine-3'-phosphate
  modified_base 6: mod_base = OTHER; note = guanosine-3'-phosphate
  modified_base 7: mod_base = OTHER; note = guanosine-3'-phosphate
  modified_base 8: mod_base = OTHER; note = guanosine-3'-phosphate
  modified_base 9: mod_base = OTHER; note = cytidine-3'-phosphate
  modified_base 10: mod_base = OTHER; note = cytidine-3'-phosphate
  modified_base 11: mod_base = OTHER; note = cytidine-3'-phosphate
  modified_base 12: mod_base = OTHER; note = guanosine-3'-phosphate
  modified_base 13: mod_base = OTHER; note = guanosine-3'-phosphate
  modified_base 14: mod_base = OTHER; note = uridine-3'-phosphate
  modified_base 15: mod_base = OTHER; note = guanosine-3'-phosphate
  modified_base 16: mod_base = OTHER; note = adenosine-3'-phosphate
  modified_base 17: mod_base = OTHER; note = guanosine-3'-phosphate
  modified_base 18: mod_base = OTHER; note = guanosine-3'-phosphate
  modified_base 19: mod_base = OTHER; note = guanosine-3'-phosphate
  misc_feature 1..19: note = RNA
  misc_feature 20..21: note = DNA
acaccgggcccggtgagggtt

SEQ ID NO: 1215 - DNA, 21 bp, synthetic construct
  source 1..21: mol_type = other DNA
  modified_base 1: mod_base = OTHER; note = adenosine-3'-phosphate
  modified_base 2: mod_base = OTHER; note = guanosine-3'-phosphate
  modified_base 3: mod_base = OTHER; note = uridine-3'-phosphate
  modified_base 4: mod_base = OTHER; note = guanosine-3'-phosphate
  modified_base 5: mod_base = OTHER; note = cytidine-3'-phosphate
  modified_base 6: mod_base = OTHER; note = adenosine-3'-phosphate
  modified_base 7: mod_base = OTHER; note = cytidine-3'-phosphate
  modified_base 8: mod_base = OTHER; note = cytidine-3'-phosphate
  modified_base 9: mod_base = OTHER; note = cytidine-3'-phosphate
  modified_base 10: mod_base = OTHER; note = guanosine-3'-phosphate
  modified_base 11: mod_base = OTHER; note = cytidine-3'-phosphate
  modified_base 12: mod_base = OTHER; note = adenosine-3'-phosphate
  modified_base 13: mod_base = OTHER; note = cytidine-3'-phosphate
  modified_base 14: mod_base = OTHER; note = adenosine-3'-phosphate
  modified_base 15: mod_base = OTHER; note = cytidine-3'-phosphate
  modified_base 16: mod_base = OTHER; note = cytidine-3'-phosphate
  modified_base 17: mod_base = OTHER; note = guanosine-3'-phosphate
  modified_base 18: mod_base = OTHER; note = guanosine-3'-phosphate
  modified_base 19: mod_base = OTHER; note = guanosine-3'-phosphate
  misc_feature 1..19: note = RNA
  misc_feature 20..21: note = DNA
agtgcacccgcacaccgggtt

SEQ ID NO: 1216 - DNA, 21 bp, synthetic construct
  source 1..21: mol_type = other DNA
  modified_base 1: mod_base = OTHER; note = uridine-3'-phosphate
  modified_base 2: mod_base = OTHER; note = cytidine-3'-phosphate
  modified_base 3: mod_base = OTHER; note = cytidine-3'-phosphate
  modified_base 4: mod_base = OTHER; note = guanosine-3'-phosphate
  modified_base 5: mod_base = OTHER; note = adenosine-3'-phosphate
  modified_base 6: mod_base = OTHER; note = cytidine-3'-phosphate
  modified_base 7: mod_base = OTHER; note = uridine-3'-phosphate
  modified_base 8: mod_base = OTHER; note = guanosine-3'-phosphate
  modified_base 9: mod_base = OTHER; note = guanosine-3'-phosphate
  modified_base 10: mod_base = OTHER; note = uridine-3'-phosphate
  modified_base 11: mod_base = OTHER; note = uridine-3'-phosphate
  modified_base 12: mod_base = OTHER; note = guanosine-3'-phosphate
  modified_base 13: mod_base = OTHER; note = uridine-3'-phosphate
  modified_base 14: mod_base = OTHER; note = adenosine-3'-phosphate
  modified_base 15: mod_base = OTHER; note = cytidine-3'-phosphate
  modified_base 16: mod_base = OTHER; note = adenosine-3'-phosphate
  modified_base 17: mod_base = OTHER; note = adenosine-3'-phosphate
  modified_base 18: mod_base = OTHER; note = guanosine-3'-phosphate
  modified_base 19: mod_base = OTHER; note = cytidine-3'-phosphate
  misc_feature 1..19: note = RNA
  misc_feature 20..21: note = DNA
tccgactggttgtacaagctt

SEQ ID NO: 1217 - DNA, 21 bp, synthetic construct
  source 1..21: mol_type = other DNA
  modified_base 1: mod_base = OTHER; note = cytidine-3'-phosphate
  modified_base 2: mod_base = OTHER; note = adenosine-3'-phosphate
  modified_base 3: mod_base = OTHER; note = guanosine-3'-phosphate
  modified_base 4: mod_base = OTHER; note = guanosine-3'-phosphate
  modified_base 5: mod_base = OTHER; note = guanosine-3'-phosphate
  modified_base 6: mod_base = OTHER; note = guanosine-3'-phosphate
  modified_base 7: mod_base = OTHER; note = uridine-3'-phosphate
  modified_base 8: mod_base = OTHER; note = cytidine-3'-phosphate
  modified_base 9: mod_base = OTHER; note = cytidine-3'-phosphate
  modified_base 10: mod_base = OTHER; note = guanosine-3'-phosphate
  modified_base 11: mod_base = OTHER; note = adenosine-3'-phosphate
  modified_base 12: mod_base = OTHER; note = cytidine-3'-phosphate
  modified_base 13: mod_base = OTHER; note = uridine-3'-phosphate
  modified_base 14: mod_base = OTHER; note = guanosine-3'-phosphate
  modified_base 15: mod_base = OTHER; note = guanosine-3'-phosphate
  modified_base 16: mod_base = OTHER; note = uridine-3'-phosphate
  modified_base 17: mod_base = OTHER; note = uridine-3'-phosphate
  modified_base 18: mod_base = OTHER; note = guanosine-3'-phosphate
  modified_base 19: mod_base = OTHER; note = uridine-3'-phosphate
  misc_feature 1..19: note = RNA
  misc_feature 20..21: note = DNA
caggggtccgactggttgttt

SEQ ID NO: 1218 - DNA, 21 bp, synthetic construct
  source 1..21: mol_type = other DNA
  modified_base 1: mod_base = OTHER; note = adenosine-3'-phosphate
  modified_base 2: mod_base = OTHER; note = adenosine-3'-phosphate
  modified_base 3: mod_base = OTHER; note = cytidine-3'-phosphate
  modified_base 4: mod_base = OTHER; note = uridine-3'-phosphate
  modified_base 5: mod_base = OTHER; note = cytidine-3'-phosphate
  modified_base 6: mod_base = OTHER; note = uridine-3'-phosphate
  modified_base 7: mod_base = OTHER; note = cytidine-3'-phosphate
  modified_base 8: mod_base = OTHER; note = cytidine-3'-phosphate
  modified_base 9: mod_base = OTHER; note = adenosine-3'-phosphate
  modified_base 10: mod_base = OTHER; note = guanosine-3'-phosphate
  modified_base 11: mod_base = OTHER; note = guanosine-3'-phosphate
  modified_base 12: mod_base = OTHER; note = guanosine-3'-phosphate
  modified_base 13: mod_base = OTHER; note = cytidine-3'-phosphate
  modified_base 14: mod_base = OTHER; note = adenosine-3'-phosphate
  modified_base 15: mod_base = OTHER; note = guanosine-3'-phosphate
  modified_base 16: mod_base = OTHER; note = guanosine-3'-phosphate
  modified_base 17: mod_base = OTHER; note = guanosine-3'-phosphate
  modified_base 18: mod_base = OTHER; note = guanosine-3'-phosphate
  modified_base 19: mod_base = OTHER; note = uridine-3'-phosphate
  misc_feature 1..19: note = RNA
  misc_feature 20..21: note = DNA
aactctccagggcaggggttt

SEQ ID NO: 1219 - DNA, 21 bp, synthetic construct
  source 1..21: mol_type = other DNA
  modified_base 1: mod_base = OTHER; note = adenosine-3'-phosphate
  modified_base 2: mod_base = OTHER; note = adenosine-3'-phosphate
  modified_base 3: mod_base = OTHER; note = cytidine-3'-phosphate
  modified_base 4: mod_base = OTHER; note = adenosine-3'-phosphate
  modified_base 5: mod_base = OTHER; note = guanosine-3'-phosphate
  modified_base 6: mod_base = OTHER; note = adenosine-3'-phosphate
  modified_base 7: mod_base = OTHER; note = guanosine-3'-phosphate
  modified_base 8: mod_base = OTHER; note = guanosine-3'-phosphate
  modified_base 9: mod_base = OTHER; note = adenosine-3'-phosphate
  modified_base 10: mod_base = OTHER; note = adenosine-3'-phosphate
  modified_base 11: mod_base = OTHER; note = cytidine-3'-phosphate
  modified_base 12: mod_base = OTHER; note = uridine-3'-phosphate
  modified_base 13: mod_base = OTHER; note = cytidine-3'-phosphate
  modified_base 14: mod_base = OTHER; note = uridine-3'-phosphate
  modified_base 15: mod_base = OTHER; note = cytidine-3'-phosphate
  modified_base 16: mod_base = OTHER; note = cytidine-3'-phosphate
  modified_base 17: mod_base = OTHER; note = adenosine-3'-phosphate
  modified_base 18: mod_base = OTHER; note = guanosine-3'-phosphate
  modified_base 19: mod_base = OTHER; note = guanosine-3'-phosphate
  misc_feature 1..19: note = RNA
  misc_feature 20..21: note = DNA
aacagaggaactctccaggtt

SEQ ID NO: 1220 - DNA, 21 bp, synthetic construct
  source 1..21: mol_type = other DNA
  modified_base 1: mod_base = OTHER; note = adenosine-3'-phosphate
  modified_base 2: mod_base = OTHER; note = guanosine-3'-phosphate
  modified_base 3: mod_base = OTHER; note = uridine-3'-phosphate
  modified_base 4: mod_base = OTHER; note = cytidine-3'-phosphate
  modified_base 5: mod_base = OTHER; note = cytidine-3'-phosphate
  modified_base 6: mod_base = OTHER; note = adenosine-3'-phosphate
  modified_base 7: mod_base = OTHER; note = uridine-3'-phosphate
  modified_base 8: mod_base = OTHER; note = uridine-3'-phosphate
  modified_base 9: mod_base = OTHER; note = cytidine-3'-phosphate
  modified_base 10: mod_base = OTHER; note = adenosine-3'-phosphate
  modified_base 11: mod_base = OTHER; note = cytidine-3'-phosphate
  modified_base 12: mod_base = OTHER; note = adenosine-3'-phosphate
  modified_base 13: mod_base = OTHER; note = guanosine-3'-phosphate
  modified_base 14: mod_base = OTHER; note = adenosine-3'-phosphate
  modified_base 15: mod_base = OTHER; note = adenosine-3'-phosphate
  modified_base 16: mod_base = OTHER; note = cytidine-3'-phosphate
  modified_base 17: mod_base = OTHER; note = adenosine-3'-phosphate
  modified_base 18: mod_base = OTHER; note = guanosine-3'-phosphate
  modified_base 19: mod_base = OTHER; note = adenosine-3'-phosphate
  misc_feature 1..19: note = RNA
  misc_feature 20..21: note = DNA
agtccattcacagaacagatt

SEQ ID NO: 1221 - DNA, 21 bp, synthetic construct
  source 1..21: mol_type = other DNA
  modified_base 1: mod_base = OTHER; note = adenosine-3'-phosphate
  modified_base 2: mod_base = OTHER; note = guanosine-3'-phosphate
  modified_base 3: mod_base = OTHER; note = guanosine-3'-phosphate
  modified_base 4: mod_base = OTHER; note = guanosine-3'-phosphate
  modified_base 5: mod_base = OTHER; note = adenosine-3'-phosphate
  modified_base 6: mod_base = OTHER; note = cytidine-3'-phosphate
  modified_base 7: mod_base = OTHER; note = adenosine-3'-phosphate
  modified_base 8: mod_base = OTHER; note = cytidine-3'-phosphate
  modified_base 9: mod_base = OTHER; note = adenosine-3'-phosphate
  modified_base 10: mod_base = OTHER; note = guanosine-3'-phosphate
  modified_base 11: mod_base = OTHER; note = adenosine-3'-phosphate
  modified_base 12: mod_base = OTHER; note = guanosine-3'-phosphate
  modified_base 13: mod_base = OTHER; note = uridine-3'-phosphate
  modified_base 14: mod_base = OTHER; note = cytidine-3'-phosphate
  modified_base 15: mod_base = OTHER; note = cytidine-3'-phosphate
  modified_base 16: mod_base = OTHER; note = adenosine-3'-phosphate
  modified_base 17: mod_base = OTHER; note = uridine-3'-phosphate
  modified_base 18: mod_base = OTHER; note = uridine-3'-phosphate
  modified_base 19: mod_base = OTHER; note = cytidine-3'-phosphate
  misc_feature 1..19: note = RNA
  misc_feature 20..21: note = DNA
agggacacagagtccattctt

SEQ ID NO: 1222 - DNA, 21 bp, synthetic construct
  source 1..21: mol_type = other DNA
  modified_base 1: mod_base = OTHER; note = adenosine-3'-phosphate
  modified_base 2: mod_base = OTHER; note = uridine-3'-phosphate
  modified_base 3: mod_base = OTHER; note = cytidine-3'-phosphate
  modified_base 4: mod_base = OTHER; note = adenosine-3'-phosphate
  modified_base 5: mod_base = OTHER; note = cytidine-3'-phosphate
  modified_base 6: mod_base = OTHER; note = adenosine-3'-phosphate
  modified_base 7: mod_base = OTHER; note = guanosine-3'-phosphate
  modified_base 8: mod_base = OTHER; note = guanosine-3'-phosphate
  modified_base 9: mod_base = OTHER; note = cytidine-3'-phosphate
  modified_base 10: mod_base = OTHER; note = adenosine-3'-phosphate
  modified_base 11: mod_base = OTHER; note = guanosine-3'-phosphate
  modified_base 12: mod_base = OTHER; note = guanosine-3'-phosphate
  modified_base 13: mod_base = OTHER; note = guanosine-3'-phosphate
  modified_base 14: mod_base = OTHER; note = adenosine-3'-phosphate
  modified_base 15: mod_base = OTHER; note = cytidine-3'-phosphate
  modified_base 16: mod_base = OTHER; note = adenosine-3'-phosphate
  modified_base 17: mod_base = OTHER; note = cytidine-3'-phosphate
  modified_base 18: mod_base = OTHER; note = adenosine-3'-phosphate
  modified_base 19: mod_base = OTHER; note = guanosine-3'-phosphate
  misc_feature 1..19: note = RNA
  misc_feature 20..21: note = DNA
atcacaggcagggacacagtt

SEQ ID NO: 1223 - DNA, 21 bp, synthetic construct
  source 1..21: mol_type = other DNA
  modified_base 1: mod_base = OTHER; note = uridine-3'-phosphate
  modified_base 2: mod_base = OTHER; note = uridine-3'-phosphate
  modified_base 3: mod_base = OTHER; note = guanosine-3'-phosphate
  modified_base 4: mod_base = OTHER; note = adenosine-3'-phosphate
  modified_base 5: mod_base = OTHER; note = cytidine-3'-phosphate
  modified_base 6: mod_base = OTHER; note = cytidine-3'-phosphate
  modified_base 7: mod_base = OTHER; note = cytidine-3'-phosphate
  modified_base 8: mod_base = OTHER; note = cytidine-3'-phosphate
  modified_base 9: mod_base = OTHER; note = adenosine-3'-phosphate
  modified_base 10: mod_base = OTHER; note = uridine-3'-phosphate
  modified_base 11: mod_base = OTHER; note = cytidine-3'-phosphate
  modified_base 12: mod_base = OTHER; note = adenosine-3'-phosphate
  modified_base 13: mod_base = OTHER; note = cytidine-3'-phosphate
  modified_base 14: mod_base = OTHER; note = adenosine-3'-phosphate
  modified_base 15: mod_base = OTHER; note = guanosine-3'-phosphate
  modified_base 16: mod_base = OTHER; note = guanosine-3'-phosphate
  modified_base 17: mod_base = OTHER; note = cytidine-3'-phosphate
  modified_base 18: mod_base = OTHER; note = adenosine-3'-phosphate
  modified_base 19: mod_base = OTHER; note = guanosine-3'-phosphate
  misc_feature 1..19: note = RNA
  misc_feature 20..21: note = DNA
ttgaccccatcacaggcagtt

SEQ ID NO: 1224 - DNA, 21 bp, synthetic construct
  source 1..21: mol_type = other DNA
  modified_base 1: mod_base = OTHER; note = guanosine-3'-phosphate
  modified_base 2: mod_base = OTHER; note = uridine-3'-phosphate
  modified_base 3: mod_base = OTHER; note = uridine-3'-phosphate
  modified_base 4: mod_base = OTHER; note = guanosine-3'-phosphate
  modified_base 5: mod_base = OTHER; note = guanosine-3'-phosphate
  modified_base 6: mod_base = OTHER; note = guanosine-3'-phosphate
  modified_base 7: mod_base = OTHER; note = guanosine-3'-phosphate
  modified_base 8: mod_base = OTHER; note = cytidine-3'-phosphate
  modified_base 9: mod_base = OTHER; note = adenosine-3'-phosphate
  modified_base 10: mod_base = OTHER; note = guanosine-3'-phosphate
  modified_base 11: mod_base = OTHER; note = uridine-3'-phosphate
  modified_base 12: mod_base = OTHER; note = cytidine-3'-phosphate
  modified_base 13: mod_base = OTHER; note = cytidine-3'-phosphate
  modified_base 14: mod_base = OTHER; note = uridine-3'-phosphate
  modified_base 15: mod_base = OTHER; note = uridine-3'-phosphate
  modified_base 16: mod_base = OTHER; note = guanosine-3'-phosphate
  modified_base 17: mod_base = OTHER; note = adenosine-3'-phosphate
  modified_base 18: mod_base = OTHER; note = cytidine-3'-phosphate
  modified_base 19: mod_base = OTHER; note = cytidine-3'-phosphate
  misc_feature 1..19: note = RNA
  misc_feature 20..21: note = DNA
gttggggcagtccttgacctt

SEQ ID NO: 1225 - DNA, 21 bp, synthetic construct
  source 1..21: mol_type = other DNA
  modified_base 1: mod_base = OTHER; note = cytidine-3'-phosphate
  modified_base 2: mod_base = OTHER; note = adenosine-3'-phosphate
  modified_base 3: mod_base = OTHER; note = uridine-3'-phosphate
  modified_base 4: mod_base = OTHER; note = cytidine-3'-phosphate
  modified_base 5: mod_base = OTHER; note = cytidine-3'-phosphate
  modified_base 6: mod_base = OTHER; note = adenosine-3'-phosphate
  modified_base 7: mod_base = OTHER; note = guanosine-3'-phosphate
  modified_base 8: mod_base = OTHER; note = guanosine-3'-phosphate
  modified_base 9: mod_base = OTHER; note = cytidine-3'-phosphate
  modified_base 10: mod_base = OTHER; note = cytidine-3'-phosphate
  modified_base 11: mod_base = OTHER; note = guanosine-3'-phosphate
  modified_base 12: mod_base = OTHER; note = uridine-3'-phosphate
  modified_base 13: mod_base = OTHER; note = uridine-3'-phosphate
  modified_base 14: mod_base = OTHER; note = guanosine-3'-phosphate
  modified_base 15: mod_base = OTHER; note = guanosine-3'-phosphate
  modified_base 16: mod_base = OTHER; note = guanosine-3'-phosphate
  modified_base 17: mod_base = OTHER; note = guanosine-3'-phosphate
  modified_base 18: mod_base = OTHER; note = cytidine-3'-phosphate
  modified_base 19: mod_base = OTHER; note = adenosine-3'-phosphate
  misc_feature 1..19: note = RNA
  misc_feature 20..21: note = DNA
catccaggccgttggggcatt

SEQ ID NO: 1226 - DNA, 21 bp, synthetic construct
  source 1..21: mol_type = other DNA
  modified_base 1: mod_base = OTHER; note = guanosine-3'-phosphate
  modified_base 2: mod_base = OTHER; note = uridine-3'-phosphate
  modified_base 3: mod_base = OTHER; note = uridine-3'-phosphate
  modified_base 4: mod_base = OTHER; note = uridine-3'-phosphate
  modified_base 5: mod_base = OTHER; note = cytidine-3'-phosphate
  modified_base 6: mod_base = OTHER; note = uridine-3'-phosphate
  modified_base 7: mod_base = OTHER; note = cytidine-3'-phosphate
  modified_base 8: mod_base = OTHER; note = uridine-3'-phosphate
  modified_base 9: mod_base = OTHER; note = cytidine-3'-phosphate
  modified_base 10: mod_base = OTHER; note = adenosine-3'-phosphate
  modified_base 11: mod_base = OTHER; note = uridine-3'-phosphate
  modified_base 12: mod_base = OTHER; note = cytidine-3'-phosphate
  modified_base 13: mod_base = OTHER; note = cytidine-3'-phosphate
  modified_base 14: mod_base = OTHER; note = adenosine-3'-phosphate
  modified_base 15: mod_base = OTHER; note = guanosine-3'-phosphate
  modified_base 16: mod_base = OTHER; note = guanosine-3'-phosphate
  modified_base 17: mod_base = OTHER; note = cytidine-3'-phosphate
  modified_base 18: mod_base = OTHER; note = cytidine-3'-phosphate
  modified_base 19: mod_base = OTHER; note = guanosine-3'-phosphate
  misc_feature 1..19: note = RNA
  misc_feature 20..21: note = DNA
gtttctctcatccaggccgtt

SEQ ID NO: 1227 - DNA, 21 bp, synthetic construct
  source 1..21: mol_type = other DNA
  modified_base 1: mod_base = OTHER; note = uridine-3'-phosphate
  modified_base 2: mod_base = OTHER; note = guanosine-3'-phosphate
  modified_base 3: mod_base = OTHER; note = cytidine-3'-phosphate
  modified_base 4: mod_base = OTHER; note = adenosine-3'-phosphate
  modified_base 5: mod_base = OTHER; note = adenosine-3'-phosphate
  modified_base 6: mod_base = OTHER; note = adenosine-3'-phosphate
  modified_base 7: mod_base = OTHER; note = cytidine-3'-phosphate
  modified_base 8: mod_base = OTHER; note = guanosine-3'-phosphate
  modified_base 9: mod_base = OTHER; note = cytidine-3'-phosphate
  modified_base 10: mod_base = OTHER; note = adenosine-3'-phosphate
  modified_base 11: mod_base = OTHER; note = guanosine-3'-phosphate
  modified_base 12: mod_base = OTHER; note = uridine-3'-phosphate
  modified_base 13: mod_base = OTHER; note = uridine-3'-phosphate
  modified_base 14: mod_base = OTHER; note = uridine-3'-phosphate
  modified_base 15: mod_base = OTHER; note = cytidine-3'-phosphate
  modified_base 16: mod_base = OTHER; note = uridine-3'-phosphate
  modified_base 17: mod_base = OTHER; note = cytidine-3'-phosphate
  modified_base 18: mod_base = OTHER; note = uridine-3'-phosphate
  modified_base 19: mod_base = OTHER; note = cytidine-3'-phosphate
  misc_feature 1..19: note = RNA
  misc_feature 20..21: note = DNA
tgcaaacgcagtttctctctt

SEQ ID NO: 1228 - DNA, 21 bp, synthetic construct
  source 1..21: mol_type = other DNA
  modified_base 1: mod_base = OTHER; note = uridine-3'-phosphate
  modified_base 2: mod_base = OTHER; note = guanosine-3'-phosphate
  modified_base 3: mod_base = OTHER; note = guanosine-3'-phosphate
  modified_base 4: mod_base = OTHER; note = adenosine-3'-phosphate
  modified_base 5: mod_base = OTHER; note = adenosine-3'-phosphate
  modified_base 6: mod_base = OTHER; note = uridine-3'-phosphate
  modified_base 7: mod_base = OTHER; note = guanosine-3'-phosphate
  modified_base 8: mod_base = OTHER; note = uridine-3'-phosphate
  modified_base 9: mod_base = OTHER; note = guanosine-3'-phosphate
  modified_base 10: mod_base = OTHER; note = guanosine-3'-phosphate
  modified_base 11: mod_base = OTHER; note = cytidine-3'-phosphate
  modified_base 12: mod_base = OTHER; note = uridine-3'-phosphate
  modified_base 13: mod_base = OTHER; note = cytidine-3'-phosphate
  modified_base 14: mod_base = OTHER; note = uridine-3'-phosphate
  modified_base 15: mod_base = OTHER; note = guanosine-3'-phosphate
  modified_base 16: mod_base = OTHER; note = cytidine-3'-phosphate
  modified_base 17: mod_base = OTHER; note = adenosine-3'-phosphate
  modified_base 18: mod_base = OTHER; note = adenosine-3'-phosphate
  modified_base 19: mod_base = OTHER; note = adenosine-3'-phosphate
  misc_feature 1..19: note = RNA
  misc_feature 20..21: note = DNA
tggaatgtggctctgcaaatt

SEQ ID NO: 1229 - DNA, 21 bp, synthetic construct
  source 1..21: mol_type = other DNA
  modified_base 1: mod_base = OTHER; note = cytidine-3'-phosphate
  modified_base 2: mod_base = OTHER; note = uridine-3'-phosphate
  modified_base 3: mod_base = OTHER; note = uridine-3'-phosphate
  modified_base 4: mod_base = OTHER; note = uridine-3'-phosphate
  modified_base 5: mod_base = OTHER; note = guanosine-3'-phosphate
  modified_base 6: mod_base = OTHER; note = cytidine-3'-phosphate
  modified_base 7: mod_base = OTHER; note = adenosine-3'-phosphate
  modified_base 8: mod_base = OTHER; note = cytidine-3'-phosphate
  modified_base 9: mod_base = OTHER; note = uridine-3'-phosphate
  modified_base 10: mod_base = OTHER; note = guanosine-3'-phosphate
  modified_base 11: mod_base = OTHER; note = guanosine-3'-phosphate
  modified_base 12: mod_base = OTHER; note = adenosine-3'-phosphate
  modified_base 13: mod_base = OTHER; note = adenosine-3'-phosphate
  modified_base 14: mod_base = OTHER; note = uridine-3'-phosphate
  modified_base 15: mod_base = OTHER; note = guanosine-3'-phosphate
  modified_base 16: mod_base = OTHER; note = uridine-3'-phosphate
  modified_base 17: mod_base = OTHER; note = guanosine-3'-phosphate
  modified_base 18: mod_base = OTHER; note = guanosine-3'-phosphate
  modified_base 19: mod_base = OTHER; note = cytidine-3'-phosphate
  misc_feature 1..19: note = RNA
  misc_feature 20..21: note = DNA
ctttgcactggaatgtggctt

SEQ ID NO: 1230 - DNA, 21 bp, synthetic construct
  source 1..21: mol_type = other DNA
  modified_base 1: mod_base = OTHER; note = uridine-3'-phosphate
  modified_base 2: mod_base = OTHER; note = guanosine-3'-phosphate
  modified_base 3: mod_base = OTHER; note = uridine-3'-phosphate
  modified_base 4: mod_base = OTHER; note = guanosine-3'-phosphate
  modified_base 5: mod_base = OTHER; note = cytidine-3'-phosphate
  modified_base 6: mod_base = OTHER; note = uridine-3'-phosphate
  modified_base 7: mod_base = OTHER; note = guanosine-3'-phosphate
  modified_base 8: mod_base = OTHER; note = uridine-3'-phosphate
  modified_base 9: mod_base = OTHER; note = cytidine-3'-phosphate
  modified_base 10: mod_base = OTHER; note = cytidine-3'-phosphate
  modified_base 11: mod_base = OTHER; note = uridine-3'-phosphate
  modified_base 12: mod_base = OTHER; note = cytidine-3'-phosphate
  modified_base 13: mod_base = OTHER; note = uridine-3'-phosphate
  modified_base 14: mod_base = OTHER; note = uridine-3'-phosphate
  modified_base 15: mod_base = OTHER; note = uridine-3'-phosphate
  modified_base 16: mod_base = OTHER; note = guanosine-3'-phosphate
  modified_base 17: mod_base = OTHER; note = cytidine-3'-phosphate
  modified_base 18: mod_base = OTHER; note = adenosine-3'-phosphate
  modified_base 19: mod_base = OTHER; note = cytidine-3'-phosphate
  misc_feature 1..19: note = RNA
  misc_feature 20..21: note = DNA
tgtgctgtcctctttgcactt

SEQ ID NO: 1231 - DNA, 21 bp, synthetic construct
  source 1..21: mol_type = other DNA
  modified_base 1: mod_base = OTHER; note = adenosine-3'-phosphate
  modified_base 2: mod_base = OTHER; note = guanosine-3'-phosphate
  modified_base 3: mod_base = OTHER; note = adenosine-3'-phosphate
  modified_base 4: mod_base = OTHER; note = uridine-3'-phosphate
  modified_base 5: mod_base = OTHER; note = guanosine-3'-phosphate
  modified_base 6: mod_base = OTHER; note = cytidine-3'-phosphate
  modified_base 7: mod_base = OTHER; note = adenosine-3'-phosphate
  modified_base 8: mod_base = OTHER; note = uridine-3'-phosphate
  modified_base 9: mod_base = OTHER; note = guanosine-3'-phosphate
  modified_base 10: mod_base = OTHER; note = uridine-3'-phosphate
  modified_base 11: mod_base = OTHER; note = guanosine-3'-phosphate
  modified_base 12: mod_base = OTHER; note = cytidine-3'-phosphate
  modified_base 13: mod_base = OTHER; note = uridine-3'-phosphate
  modified_base 14: mod_base = OTHER; note = guanosine-3'-phosphate
  modified_base 15: mod_base = OTHER; note = uridine-3'-phosphate
  modified_base 16: mod_base = OTHER; note = cytidine-3'-phosphate
  modified_base 17: mod_base = OTHER; note = cytidine-3'-phosphate
  modified_base 18: mod_base = OTHER; note = uridine-3'-phosphate
  modified_base 19: mod_base = OTHER; note = cytidine-3'-phosphate
  misc_feature 1..19: note = RNA
  misc_feature 20..21: note = DNA
agatgcatgtgctgtcctctt

SEQ ID NO: 1232 - DNA, 21 bp, synthetic construct
  source 1..21: mol_type = other DNA
  modified_base 1: mod_base = OTHER; note = adenosine-3'-phosphate
  modified_base 2: mod_base = OTHER; note = cytidine-3'-phosphate
  modified_base 3: mod_base = OTHER; note = cytidine-3'-phosphate
  modified_base 4: mod_base = OTHER; note = uridine-3'-phosphate
  modified_base 5: mod_base = OTHER; note = uridine-3'-phosphate
  modified_base 6: mod_base = OTHER; note = guanosine-3'-phosphate
  modified_base 7: mod_base = OTHER; note = guanosine-3'-phosphate
  modified_base 8: mod_base = OTHER; note = guanosine-3'-phosphate
  modified_base 9: mod_base = OTHER; note = cytidine-3'-phosphate
  modified_base 10: mod_base = OTHER; note = adenosine-3'-phosphate
  modified_base 11: mod_base = OTHER; note = guanosine-3'-phosphate
  modified_base 12: mod_base = OTHER; note = uridine-3'-phosphate
  modified_base 13: mod_base = OTHER; note = guanosine-3'-phosphate
  modified_base 14: mod_base = OTHER; note = adenosine-3'-phosphate
  modified_base 15: mod_base = OTHER; note = guanosine-3'-phosphate
  modified_base 16: mod_base = OTHER; note = adenosine-3'-phosphate
  modified_base 17: mod_base = OTHER; note = uridine-3'-phosphate
  modified_base 18: mod_base = OTHER; note = guanosine-3'-phosphate
  modified_base 19: mod_base = OTHER; note = cytidine-3'-phosphate
  misc_feature 1..19: note = RNA
  misc_feature 20..21: note = DNA
accttgggcagtgagatgctt

SEQ ID NO: 1233 - DNA, 21 bp, synthetic construct
  source 1..21: mol_type = other DNA
  modified_base 1: mod_base = OTHER; note = cytidine-3'-phosphate
  modified_base 2: mod_base = OTHER; note = cytidine-3'-phosphate
  modified_base 3: mod_base = OTHER; note = cytidine-3'-phosphate
  modified_base 4: mod_base = OTHER; note = adenosine-3'-phosphate
  modified_base 5: mod_base = OTHER; note = uridine-3'-phosphate
  modified_base 6: mod_base = OTHER; note = cytidine-3'-phosphate
  modified_base 7: mod_base = OTHER; note = adenosine-3'-phosphate
  modified_base 8: mod_base = OTHER; note = cytidine-3'-phosphate
  modified_base 9: mod_base = OTHER; note = adenosine-3'-phosphate
  modified_base 10: mod_base = OTHER; note = guanosine-3'-phosphate
  modified_base 11: mod_base = OTHER; note = adenosine-3'-phosphate
  modified_base 12: mod_base = OTHER; note = cytidine-3'-phosphate
  modified_base 13: mod_base = OTHER; note = cytidine-3'-phosphate
  modified_base 14: mod_base = OTHER; note = uridine-3'-phosphate
  modified_base 15: mod_base = OTHER; note = uridine-3'-phosphate
  modified_base 16: mod_base = OTHER; note = guanosine-3'-phosphate
  modified_base 17: mod_base = OTHER; note = guanosine-3'-phosphate
  modified_base 18: mod_base = OTHER; note = guanosine-3'-phosphate
  modified_base 19: mod_base = OTHER; note = cytidine-3'-phosphate
  misc_feature 1..19: note = RNA
  misc_feature 20..21: note = DNA
cccatcacagaccttgggctt

SEQ ID NO: 1234 - DNA, 21 bp, synthetic construct
  source 1..21: mol_type = other DNA
  modified_base 1: mod_base = OTHER; note = adenosine-3'-phosphate
  modified_base 2: mod_base = OTHER; note = adenosine-3'-phosphate
  modified_base 3: mod_base = OTHER; note = uridine-3'-phosphate
  modified_base 4: mod_base = OTHER; note = cytidine-3'-phosphate
  modified_base 5: mod_base = OTHER; note = adenosine-3'-phosphate
  modified_base 6: mod_base = OTHER; note = guanosine-3'-phosphate
  modified_base 7: mod_base = OTHER; note = guanosine-3'-phosphate
  modified_base 8: mod_base = OTHER; note = cytidine-3'-phosphate
  modified_base 9: mod_base = OTHER; note = uridine-3'-phosphate
  modified_base 10: mod_base = OTHER; note = guanosine-3'-phosphate
  modified_base 11: mod_base = OTHER; note = cytidine-3'-phosphate
  modified_base 12: mod_base = OTHER; note = cytidine-3'-phosphate
  modified_base 13: mod_base = OTHER; note = cytidine-3'-phosphate
  modified_base 14: mod_base = OTHER; note = adenosine-3'-phosphate
  modified_base 15: mod_base = OTHER; note = uridine-3'-phosphate
  modified_base 16: mod_base = OTHER; note = cytidine-3'-phosphate
  modified_base 17: mod_base = OTHER; note = adenosine-3'-phosphate
  modified_base 18: mod_base = OTHER; note = cytidine-3'-phosphate
  modified_base 19: mod_base = OTHER; note = adenosine-3'-phosphate
  misc_feature 1..19: note = RNA
  misc_feature 20..21: note = DNA
aatcaggctgcccatcacatt

SEQ ID NO: 1235 - DNA, 21 bp, synthetic construct
  source 1..21: mol_type = other DNA
  modified_base 1: mod_base = OTHER; note = guanosine-3'-phosphate
  modified_base 2: mod_base = OTHER; note = uridine-3'-phosphate
  modified_base 3: mod_base = OTHER; note = uridine-3'-phosphate
  modified_base 4: mod_base = OTHER; note = guanosine-3'-phosphate
  modified_base 5: mod_base = OTHER; note = adenosine-3'-phosphate
  modified_base 6: mod_base = OTHER; note = guanosine-3'-phosphate
  modified_base 7: mod_base = OTHER; note = adenosine-3'-phosphate
  modified_base 8: mod_base = OTHER; note = cytidine-3'-phosphate
  modified_base 9: mod_base = OTHER; note = adenosine-3'-phosphate
  modified_base 10: mod_base = OTHER; note = adenosine-3'-phosphate
  modified_base 11: mod_base = OTHER; note = uridine-3'-phosphate
  modified_base 12: mod_base = OTHER; note = cytidine-3'-phosphate
  modified_base 13: mod_base = OTHER; note = adenosine-3'-phosphate
  modified_base 14: mod_base = OTHER; note = guanosine-3'-phosphate
  modified_base 15: mod_base = OTHER; note = guanosine-3'-phosphate
  modified_base 16: mod_base = OTHER; note = cytidine-3'-phosphate
  modified_base 17: mod_base = OTHER; note = uridine-3'-phosphate
  modified_base 18: mod_base = OTHER; note = guanosine-3'-phosphate
  modified_base 19: mod_base = OTHER; note = cytidine-3'-phosphate
  misc_feature 1..19: note = RNA
  misc_feature 20..21: note = DNA
gttgagacaatcaggctgctt

SEQ ID NO: 1236 - DNA, 21 bp, synthetic construct
  source 1..21: mol_type = other DNA
  modified_base 1: mod_base = OTHER; note = uridine-3'-phosphate
  modified_base 2: mod_base = OTHER; note = cytidine-3'-phosphate
  modified_base 3: mod_base = OTHER; note = guanosine-3'-phosphate
  modified_base 4: mod_base = OTHER; note = uridine-3'-phosphate
  modified_base 5: mod_base = OTHER; note = cytidine-3'-phosphate
  modified_base 6: mod_base = OTHER; note = guanosine-3'-phosphate
  modified_base 7: mod_base = OTHER; note = cytidine-3'-phosphate
  modified_base 8: mod_base = OTHER; note = uridine-3'-phosphate
  modified_base 9: mod_base = OTHER; note = guanosine-3'-phosphate
  modified_base 10: mod_base = OTHER; note = cytidine-3'-phosphate
  modified_base 11: mod_base = OTHER; note = cytidine-3'-phosphate
  modified_base 12: mod_base = OTHER; note = guanosine-3'-phosphate
  modified_base 13: mod_base = OTHER; note = uridine-3'-phosphate
  modified_base 14: mod_base = OTHER; note = uridine-3'-phosphate
  modified_base 15: mod_base = OTHER; note = guanosine-3'-phosphate
  modified_base 16: mod_base = OTHER; note = adenosine-3'-phosphate
  modified_base 17: mod_base = OTHER; note = guanosine-3'-phosphate
  modified_base 18: mod_base = OTHER; note = adenosine-3'-phosphate
  modified_base 19: mod_base = OTHER; note = cytidine-3'-phosphate
  misc_feature 1..19: note = RNA
  misc_feature 20..21: note = DNA
tcgtcgctgccgttgagactt

SEQ ID NO: 1237 - DNA, 21 bp, synthetic construct
  source 1..21: mol_type = other DNA
  modified_base 1: mod_base = OTHER; note = uridine-3'-phosphate
  modified_base 2: mod_base = OTHER; note = guanosine-3'-phosphate
  modified_base 3: mod_base = OTHER; note = guanosine-3'-phosphate
  modified_base 4: mod_base = OTHER; note = cytidine-3'-phosphate
  modified_base 5: mod_base = OTHER; note = adenosine-3'-phosphate
  modified_base 6: mod_base = OTHER; note = cytidine-3'-phosphate
  modified_base 7: mod_base = OTHER; note = uridine-3'-phosphate
  modified_base 8: mod_base = OTHER; note = guanosine-3'-phosphate
  modified_base 9: mod_base = OTHER; note = cytidine-3'-phosphate
  modified_base 10: mod_base = OTHER; note = uridine-3'-phosphate
  modified_base 11: mod_base = OTHER; note = cytidine-3'-phosphate
  modified_base 12: mod_base = OTHER; note = uridine-3'-phosphate
  modified_base 13: mod_base = OTHER; note = uridine-3'-phosphate
  modified_base 14: mod_base = OTHER; note = cytidine-3'-phosphate
  modified_base 15: mod_base = OTHER; note = guanosine-3'-phosphate
  modified_base 16: mod_base = OTHER; note = uridine-3'-phosphate
  modified_base 17: mod_base = OTHER; note = cytidine-3'-phosphate
  modified_base 18: mod_base = OTHER; note = guanosine-3'-phosphate
  modified_base 19: mod_base = OTHER; note = cytidine-3'-phosphate
  misc_feature 1..19: note = RNA
  misc_feature 20..21: note = DNA
tggcactgctcttcgtcgctt

SEQ ID NO: 1238 - DNA, 21 bp, synthetic construct
  source 1..21: mol_type = other DNA
  modified_base 1: mod_base = OTHER; note = adenosine-3'-phosphate
  modified_base 2: mod_base = OTHER; note = cytidine-3'-phosphate
  modified_base 3: mod_base = OTHER; note = cytidine-3'-phosphate
  modified_base 4: mod_base = OTHER; note = cytidine-3'-phosphate
  modified_base 5: mod_base = OTHER; note = cytidine-3'-phosphate
  modified_base 6: mod_base = OTHER; note = uridine-3'-phosphate
  modified_base 7: mod_base = OTHER; note = uridine-3'-phosphate
  modified_base 8: mod_base = OTHER; note = cytidine-3'-phosphate
  modified_base 9: mod_base = OTHER; note = cytidine-3'-phosphate
  modified_base 10: mod_base = OTHER; note = uridine-3'-phosphate
  modified_base 11: mod_base = OTHER; note = guanosine-3'-phosphate
  modified_base 12: mod_base = OTHER; note = guanosine-3'-phosphate
  modified_base 13: mod_base = OTHER; note = cytidine-3'-phosphate
  modified_base 14: mod_base = OTHER; note = adenosine-3'-phosphate
  modified_base 15: mod_base = OTHER; note = cytidine-3'-phosphate
  modified_base 16: mod_base = OTHER; note = uridine-3'-phosphate
  modified_base 17: mod_base = OTHER; note = guanosine-3'-phosphate
  modified_base 18: mod_base = OTHER; note = cytidine-3'-phosphate
  modified_base 19: mod_base = OTHER; note = uridine-3'-phosphate
  misc_feature 1..19: note = RNA
  misc_feature 20..21: note = DNA
accccttcctggcactgcttt

SEQ ID NO: 1239 - DNA, 21 bp, synthetic construct
  source 1..21: mol_type = other DNA
  modified_base 1: mod_base = OTHER; note = uridine-3'-phosphate
  modified_base 2: mod_base = OTHER; note = cytidine-3'-phosphate
  modified_base 3: mod_base = OTHER; note = cytidine-3'-phosphate
  modified_base 4: mod_base = OTHER; note = cytidine-3'-phosphate
  modified_base 5: mod_base = OTHER; note = adenosine-3'-phosphate
  modified_base 6: mod_base = OTHER; note = cytidine-3'-phosphate
  modified_base 7: mod_base = OTHER; note = adenosine-3'-phosphate
  modified_base 8: mod_base = OTHER; note = uridine-3'-phosphate
  modified_base 9: mod_base = OTHER; note = guanosine-3'-phosphate
  modified_base 10: mod_base = OTHER; note = guanosine-3'-phosphate
  modified_base 11: mod_base = OTHER; note = cytidine-3'-phosphate
  modified_base 12: mod_base = OTHER; note = adenosine-3'-phosphate
  modified_base 13: mod_base = OTHER; note = cytidine-3'-phosphate
  modified_base 14: mod_base = OTHER; note = cytidine-3'-phosphate
  modified_base 15: mod_base = OTHER; note = cytidine-3'-phosphate
  modified_base 16: mod_base = OTHER; note = cytidine-3'-phosphate
  modified_base 17: mod_base = OTHER; note = uridine-3'-phosphate
  modified_base 18: mod_base = OTHER; note = uridine-3'-phosphate
  modified_base 19: mod_base = OTHER; note = cytidine-3'-phosphate
  misc_feature 1..19: note = RNA
  misc_feature 20..21: note = DNA
tcccacatggcaccccttctt

SEQ ID NO: 1240 - DNA, 21 bp, synthetic construct
  source 1..21: mol_type = other DNA
  modified_base 1: mod_base = OTHER; note = adenosine-3'-phosphate
  modified_base 2: mod_base = OTHER; note = guanosine-3'-phosphate
  modified_base 3: mod_base = OTHER; note = guanosine-3'-phosphate
  modified_base 4: mod_base = OTHER; note = uridine-3'-phosphate
  modified_base 5: mod_base = OTHER; note = guanosine-3'-phosphate
  modified_base 6: mod_base = OTHER; note = adenosine-3'-phosphate
  modified_base 7: mod_base = OTHER; note = adenosine-3'-phosphate
  modified_base 8: mod_base = OTHER; note = uridine-3'-phosphate
  modified_base 9: mod_base = OTHER; note = guanosine-3'-phosphate
  modified_base 10: mod_base = OTHER; note = uridine-3'-phosphate
  modified_base 11: mod_base = OTHER; note = cytidine-3'-phosphate
  modified_base 12: mod_base = OTHER; note = cytidine-3'-phosphate
  modified_base 13: mod_base = OTHER; note = cytidine-3'-phosphate
  modified_base 14: mod_base = OTHER; note = adenosine-3'-phosphate
  modified_base 15: mod_base = OTHER; note = cytidine-3'-phosphate
  modified_base 16: mod_base = OTHER; note = adenosine-3'-phosphate
  modified_base 17: mod_base = OTHER; note = uridine-3'-phosphate
  modified_base 18: mod_base = OTHER; note = guanosine-3'-phosphate
  modified_base 19: mod_base = OTHER; note = guanosine-3'-phosphate
  misc_feature 1..19: note = RNA
  misc_feature 20..21: note = DNA
aggtgaatgtcccacatggtt

SEQ ID NO: 1241 - DNA, 21 bp, synthetic construct
  source 1..21: mol_type = other DNA
  modified_base 1: mod_base = OTHER; note = uridine-3'-phosphate
  modified_base 2: mod_base = OTHER; note = cytidine-3'-phosphate
  modified_base 3: mod_base = OTHER; note = adenosine-3'-phosphate
  modified_base 4: mod_base = OTHER; note = cytidine-3'-phosphate
  modified_base 5: mod_base = OTHER; note = adenosine-3'-phosphate
  modified_base 6: mod_base = OTHER; note = cytidine-3'-phosphate
  modified_base 7: mod_base = OTHER; note = uridine-3'-phosphate
  modified_base 8: mod_base = OTHER; note = guanosine-3'-phosphate
  modified_base 9: mod_base = OTHER; note = guanosine-3'-phosphate
  modified_base 10: mod_base = OTHER; note = adenosine-3'-phosphate
  modified_base 11: mod_base = OTHER; note = adenosine-3'-phosphate
  modified_base 12: mod_base = OTHER; note = guanosine-3'-phosphate
  modified_base 13: mod_base = OTHER; note = guanosine-3'-phosphate
  modified_base 14: mod_base = OTHER; note = uridine-3'-phosphate
  modified_base 15: mod_base = OTHER; note = guanosine-3'-phosphate
  modified_base 16: mod_base = OTHER; note = adenosine-3'-phosphate
  modified_base 17: mod_base = OTHER; note = adenosine-3'-phosphate
  modified_base 18: mod_base = OTHER; note = uridine-3'-phosphate
  modified_base 19: mod_base = OTHER; note = guanosine-3'-phosphate
  misc_feature 1..19: note = RNA
  misc_feature 20..21: note = DNA
tcacactggaaggtgaatgtt

SEQ ID NO: 1242 - DNA, 21 bp, synthetic construct
  source 1..21: mol_type = other DNA
  modified_base 1: mod_base = OTHER; note = adenosine-3'-phosphate
  modified_base 2: mod_base = OTHER; note = guanosine-3'-phosphate
  modified_base 3: mod_base = OTHER; note = cytidine-3'-phosphate
  modified_base 4: mod_base = OTHER; note = uridine-3'-phosphate
  modified_base 5: mod_base = OTHER; note = cytidine-3'-phosphate
  modified_base 6: mod_base = OTHER; note = cytidine-3'-phosphate
  modified_base 7: mod_base = OTHER; note = guanosine-3'-phosphate
  modified_base 8: mod_base = OTHER; note = guanosine-3'-phosphate
  modified_base 9: mod_base = OTHER; note = uridine-3'-phosphate
  modified_base 10: mod_base = OTHER; note = cytidine-3'-phosphate
  modified_base 11: mod_base = OTHER; note = cytidine-3'-phosphate
  modified_base 12: mod_base = OTHER; note = uridine-3'-phosphate
  modified_base 13: mod_base = OTHER; note = cytidine-3'-phosphate
  modified_base 14: mod_base = OTHER; note = adenosine-3'-phosphate
  modified_base 15: mod_base = OTHER; note = cytidine-3'-phosphate
  modified_base 16: mod_base = OTHER; note = adenosine-3'-phosphate
  modified_base 17: mod_base = OTHER; note = cytidine-3'-phosphate
  modified_base 18: mod_base = OTHER; note = uridine-3'-phosphate
  modified_base 19: mod_base = OTHER; note = guanosine-3'-phosphate
  misc_feature 1..19: note = RNA
  misc_feature 20..21: note = DNA
agctccggtcctcacactgtt

SEQ ID NO: 1243 - DNA, 21 bp, synthetic construct
  source 1..21: mol_type = other DNA
  modified_base 1: mod_base = OTHER; note = uridine-3'-phosphate
  modified_base 2: mod_base = OTHER; note = cytidine-3'-phosphate
  modified_base 3: mod_base = OTHER; note = uridine-3'-phosphate
  modified_base 4: mod_base = OTHER; note = uridine-3'-phosphate
  modified_base 5: mod_base = OTHER; note = cytidine-3'-phosphate
  modified_base 6: mod_base = OTHER; note = adenosine-3'-phosphate
  modified_base 7: mod_base = OTHER; note = cytidine-3'-phosphate
  modified_base 8: mod_base = OTHER; note = guanosine-3'-phosphate
  modified_base 9: mod_base = OTHER; note = cytidine-3'-phosphate
  modified_base 10: mod_base = OTHER; note = adenosine-3'-phosphate
  modified_base 11: mod_base = OTHER; note = guanosine-3'-phosphate
  modified_base 12: mod_base = OTHER; note = cytidine-3'-phosphate
  modified_base 13: mod_base = OTHER; note = uridine-3'-phosphate
  modified_base 14: mod_base = OTHER; note = cytidine-3'-phosphate
  modified_base 15: mod_base = OTHER; note = cytidine-3'-phosphate
  modified_base 16: mod_base = OTHER; note = guanosine-3'-phosphate
  modified_base 17: mod_base = OTHER; note = guanosine-3'-phosphate
  modified_base 18: mod_base = OTHER; note = uridine-3'-phosphate
  modified_base 19: mod_base = OTHER; note = cytidine-3'-phosphate
  misc_feature 1..19: note = RNA
  misc_feature 20..21: note = DNA
tcttcacgcagctccggtctt

SEQ ID NO: 1244 - DNA, 21 bp, synthetic construct
  source 1..21: mol_type = other DNA
  modified_base 1: mod_base = OTHER; note = guanosine-3'-phosphate
  modified_base 2: mod_base = OTHER; note = uridine-3'-phosphate
  modified_base 3: mod_base = OTHER; note = uridine-3'-phosphate
  modified_base 4: mod_base = OTHER; note = guanosine-3'-phosphate
  modified_base 5: mod_base = OTHER; note = guanosine-3'-phosphate
  modified_base 6: mod_base = OTHER; note = guanosine-3'-phosphate
  modified_base 7: mod_base = OTHER; note = cytidine-3'-phosphate
  modified_base 8: mod_base = OTHER; note = uridine-3'-phosphate
  modified_base 9: mod_base = OTHER; note = uridine-3'-phosphate
  modified_base 10: mod_base = OTHER; note = cytidine-3'-phosphate
  modified_base 11: mod_base = OTHER; note = uridine-3'-phosphate
  modified_base 12: mod_base = OTHER; note = uridine-3'-phosphate
  modified_base 13: mod_base = OTHER; note = cytidine-3'-phosphate
  modified_base 14: mod_base = OTHER; note = adenosine-3'-phosphate
  modified_base 15: mod_base = OTHER; note = cytidine-3'-phosphate
  modified_base 16: mod_base = OTHER; note = guanosine-3'-phosphate
  modified_base 17: mod_base = OTHER; note = cytidine-3'-phosphate
  modified_base 18: mod_base = OTHER; note = adenosine-3'-phosphate
  modified_base 19: mod_base = OTHER; note = guanosine-3'-phosphate
  misc_feature 1..19: note = RNA
  misc_feature 20..21: note = DNA
gttgggcttcttcacgcagtt

SEQ ID NO: 1245 - DNA, 21 bp, synthetic construct
  source 1..21: mol_type = other DNA
  modified_base 1: mod_base = OTHER; note = uridine-3'-phosphate
  modified_base 2: mod_base = OTHER; note = cytidine-3'-phosphate
  modified_base 3: mod_base = OTHER; note = adenosine-3'-phosphate
  modified_base 4: mod_base = OTHER; note = cytidine-3'-phosphate
  modified_base 5: mod_base = OTHER; note = adenosine-3'-phosphate
  modified_base 6: mod_base = OTHER; note = cytidine-3'-phosphate
  modified_base 7: mod_base = OTHER; note = uridine-3'-phosphate
  modified_base 8: mod_base = OTHER; note = guanosine-3'-phosphate
  modified_base 9: mod_base = OTHER; note = cytidine-3'-phosphate
  modified_base 10: mod_base = OTHER; note = guanosine-3'-phosphate
  modified_base 11: mod_base = OTHER; note = guanosine-3'-phosphate
  modified_base 12: mod_base = OTHER; note = guanosine-3'-phosphate
  modified_base 13: mod_base = OTHER; note = uridine-3'-phosphate
  modified_base 14: mod_base = OTHER; note = uridine-3'-phosphate
  modified_base 15: mod_base = OTHER; note = guanosine-3'-phosphate
  modified_base 16: mod_base = OTHER; note = guanosine-3'-phosphate
  modified_base 17: mod_base = OTHER; note = guanosine-3'-phosphate
  modified_base 18: mod_base = OTHER; note = cytidine-3'-phosphate
  modified_base 19: mod_base = OTHER; note = uridine-3'-phosphate
  misc_feature 1..19: note = RNA
  misc_feature 20..21: note = DNA
tcacactgcgggttgggcttt

SEQ ID NO: 1246 - DNA, 21 bp, synthetic construct
  source 1..21: mol_type = other DNA
  modified_base 1: mod_base = OTHER; note = cytidine-3'-phosphate
  modified_base 2: mod_base = OTHER; note = guanosine-3'-phosphate
  modified_base 3: mod_base = OTHER; note = guanosine-3'-phosphate
  modified_base 4: mod_base = OTHER; note = guanosine-3'-phosphate
  modified_base 5: mod_base = OTHER; note = cytidine-3'-phosphate
  modified_base 6: mod_base = OTHER; note = cytidine-3'-phosphate
  modified_base 7: mod_base = OTHER; note = guanosine-3'-phosphate
  modified_base 8: mod_base = OTHER; note = cytidine-3'-phosphate
  modified_base 9: mod_base = OTHER; note = cytidine-3'-phosphate
  modified_base 10: mod_base = OTHER; note = cytidine-3'-phosphate
  modified_base 11: mod_base = OTHER; note = adenosine-3'-phosphate
  modified_base 12: mod_base = OTHER; note = uridine-3'-phosphate
  modified_base 13: mod_base = OTHER; note = cytidine-3'-phosphate
  modified_base 14: mod_base = OTHER; note = adenosine-3'-phosphate
  modified_base 15: mod_base = OTHER; note = cytidine-3'-phosphate
  modified_base 16: mod_base = OTHER; note = adenosine-3'-phosphate
  modified_base 17: mod_base = OTHER; note = cytidine-3'-phosphate
  modified_base 18: mod_base = OTHER; note = uridine-3'-phosphate
  modified_base 19: mod_base = OTHER; note = guanosine-3'-phosphate
  misc_feature 1..19: note = RNA
  misc_feature 20..21: note = DNA
cgggccgcccatcacactgtt

SEQ ID NO: 1247 - DNA, 21 bp, synthetic construct
  source 1..21: mol_type = other DNA
  modified_base 1: mod_base = OTHER; note = guanosine-3'-phosphate
  modified_base 2: mod_base = OTHER; note = uridine-3'-phosphate
  modified_base 3: mod_base = OTHER; note = cytidine-3'-phosphate
  modified_base 4: mod_base = OTHER; note = cytidine-3'-phosphate
  modified_base 5: mod_base = OTHER; note = cytidine-3'-phosphate
  modified_base 6: mod_base = OTHER; note = uridine-3'-phosphate
  modified_base 7: mod_base = OTHER; note = guanosine-3'-phosphate
  modified_base 8: mod_base = OTHER; note = cytidine-3'-phosphate
  modified_base 9: mod_base = OTHER; note = adenosine-3'-phosphate
  modified_base 10: mod_base = OTHER; note = guanosine-3'-phosphate
  modified_base 11: mod_base = OTHER; note = uridine-3'-phosphate
  modified_base 12: mod_base = OTHER; note = cytidine-3'-phosphate
  modified_base 13: mod_base = OTHER; note = guanosine-3'-phosphate
  modified_base 14: mod_base = OTHER; note = guanosine-3'-phosphate
  modified_base 15: mod_base = OTHER; note = guanosine-3'-phosphate
  modified_base 16: mod_base = OTHER; note = cytidine-3'-phosphate
  modified_base 17: mod_base = OTHER; note = cytidine-3'-phosphate
  modified_base 18: mod_base = OTHER; note = guanosine-3'-phosphate
  modified_base 19: mod_base = OTHER; note = cytidine-3'-phosphate
  misc_feature 1..19: note = RNA
  misc_feature 20..21: note = DNA
gtccctgcagtcgggccgctt

SEQ ID NO: 1248 - DNA, 21 bp, synthetic construct
  source 1..21: mol_type = other DNA
  modified_base 1: mod_base = OTHER; note = adenosine-3'-phosphate
  modified_base 2: mod_base = OTHER; note = uridine-3'-phosphate
  modified_base 3: mod_base = OTHER; note = cytidine-3'-phosphate
  modified_base 4: mod_base = OTHER; note = cytidine-3'-phosphate
  modified_base 5: mod_base = OTHER; note = guanosine-3'-phosphate
  modified_base 6: mod_base = OTHER; note = adenosine-3'-phosphate
  modified_base 7: mod_base = OTHER; note = guanosine-3'-phosphate
  modified_base 8: mod_base = OTHER; note = cytidine-3'-phosphate
  modified_base 9: mod_base = OTHER; note = cytidine-3'-phosphate
  modified_base 10: mod_base = OTHER; note = guanosine-3'-phosphate
  modified_base 11: mod_base = OTHER; note = uridine-3'-phosphate
  modified_base 12: mod_base = OTHER; note = cytidine-3'-phosphate
  modified_base 13: mod_base = OTHER; note = cytidine-3'-phosphate
  modified_base 14: mod_base = OTHER; note = cytidine-3'-phosphate
  modified_base 15: mod_base = OTHER; note = uridine-3'-phosphate
  modified_base 16: mod_base = OTHER; note = guanosine-3'-phosphate
  modified_base 17: mod_base = OTHER; note = cytidine-3'-phosphate
  modified_base 18: mod_base = OTHER; note = adenosine-3'-phosphate
  modified_base 19: mod_base = OTHER; note = guanosine-3'-phosphate
  misc_feature 1..19: note = RNA
  misc_feature 20..21: note = DNA
atccgagccgtccctgcagtt

SEQ ID NO: 1249 - DNA, 21 bp, synthetic construct
  source 1..21: mol_type = other DNA
  modified_base 1: mod_base = OTHER; note = uridine-3'-phosphate
  modified_base 2: mod_base = OTHER; note = guanosine-3'-phosphate
  modified_base 3: mod_base = OTHER; note = cytidine-3'-phosphate
  modified_base 4: mod_base = OTHER; note = uridine-3'-phosphate
  modified_base 5: mod_base = OTHER; note = cytidine-3'-phosphate
  modified_base 6: mod_base = OTHER; note = cytidine-3'-phosphate
  modified_base 7: mod_base = OTHER; note = uridine-3'-phosphate
  modified_base 8: mod_base = OTHER; note = cytidine-3'-phosphate
  modified_base 9: mod_base = OTHER; note = adenosine-3'-phosphate
  modified_base 10: mod_base = OTHER; note = uridine-3'-phosphate
  modified_base 11: mod_base = OTHER; note = cytidine-3'-phosphate
  modified_base 12: mod_base = OTHER; note = cytidine-3'-phosphate
  modified_base 13: mod_base = OTHER; note = guanosine-3'-phosphate
  modified_base 14: mod_base = OTHER; note = adenosine-3'-phosphate
  modified_base 15: mod_base = OTHER; note = guanosine-3'-phosphate
  modified_base 16: mod_base = OTHER; note = cytidine-3'-phosphate
  modified_base 17: mod_base = OTHER; note = cytidine-3'-phosphate
  modified_base 18: mod_base = OTHER; note = guanosine-3'-phosphate
  modified_base 19: mod_base = OTHER; note = uridine-3'-phosphate
  misc_feature 1..19: note = RNA
  misc_feature 20..21: note = DNA
tgctcctcatccgagccgttt

SEQ ID NO: 1250 - DNA, 21 bp, synthetic construct
  source 1..21: mol_type = other DNA
  modified_base 1: mod_base = OTHER; note = adenosine-3'-phosphate
  modified_base 2: mod_base = OTHER; note = cytidine-3'-phosphate
  modified_base 3: mod_base = OTHER; note = adenosine-3'-phosphate
  modified_base 4: mod_base = OTHER; note = guanosine-3'-phosphate
  modified_base 5: mod_base = OTHER; note = uridine-3'-phosphate
  modified_base 6: mod_base = OTHER; note = cytidine-3'-phosphate
  modified_base 7: mod_base = OTHER; note = adenosine-3'-phosphate
  modified_base 8: mod_base = OTHER; note = cytidine-3'-phosphate
  modified_base 9: mod_base = OTHER; note = adenosine-3'-phosphate
  modified_base 10: mod_base = OTHER; note = guanosine-3'-phosphate
  modified_base 11: mod_base = OTHER; note = uridine-3'-phosphate
  modified_base 12: mod_base = OTHER; note = guanosine-3'-phosphate
  modified_base 13: mod_base = OTHER; note = cytidine-3'-phosphate
  modified_base 14: mod_base = OTHER; note = uridine-3'-phosphate
  modified_base 15: mod_base = OTHER; note = cytidine-3'-phosphate
  modified_base 16: mod_base = OTHER; note = cytidine-3'-phosphate
  modified_base 17: mod_base = OTHER; note = uridine-3'-phosphate
  modified_base 18: mod_base = OTHER; note = cytidine-3'-phosphate
  modified_base 19: mod_base = OTHER; note = adenosine-3'-phosphate
  misc_feature 1..19: note = RNA
  misc_feature 20..21: note = DNA
acagtcacagtgctcctcatt

SEQ ID NO: 1251 - DNA, 21 bp, synthetic construct
  source 1..21: mol_type = other DNA
  modified_base 1: mod_base = OTHER; note = cytidine-3'-phosphate
  modified_base 2: mod_base = OTHER; note = uridine-3'-phosphate
  modified_base 3: mod_base = OTHER; note = guanosine-3'-phosphate
  modified_base 4: mod_base = OTHER; note = guanosine-3'-phosphate
  modified_base 5: mod_base = OTHER; note = adenosine-3'-phosphate
  modified_base 6: mod_base = OTHER; note = guanosine-3'-phosphate
  modified_base 7: mod_base = OTHER; note = guanosine-3'-phosphate
  modified_base 8: mod_base = OTHER; note = cytidine-3'-phosphate
  modified_base 9: mod_base = OTHER; note = cytidine-3'-phosphate
  modified_base 10: mod_base = OTHER; note = adenosine-3'-phosphate
  modified_base 11: mod_base = OTHER; note = cytidine-3'-phosphate
  modified_base 12: mod_base = OTHER; note = adenosine-3'-phosphate
  modified_base 13: mod_base = OTHER; note = guanosine-3'-phosphate
  modified_base 14: mod_base = OTHER; note = uridine-3'-phosphate
  modified_base 15: mod_base = OTHER; note = cytidine-3'-phosphate
  modified_base 16: mod_base = OTHER; note = adenosine-3'-phosphate
  modified_base 17: mod_base = OTHER; note = cytidine-3'-phosphate
  modified_base 18: mod_base = OTHER; note = adenosine-3'-phosphate
  modified_base 19: mod_base = OTHER; note = guanosine-3'-phosphate
  misc_feature 1..19: note = RNA
  misc_feature 20..21: note = DNA
ctggaggccacagtcacagtt

SEQ ID NO: 1252 - DNA, 21 bp, synthetic construct
  source 1..21: mol_type = other DNA
  modified_base 1: mod_base = OTHER; note = cytidine-3'-phosphate
  modified_base 2: mod_base = OTHER; note = uridine-3'-phosphate
  modified_base 3: mod_base = OTHER; note = guanosine-3'-phosphate
  modified_base 4: mod_base = OTHER; note = guanosine-3'-phosphate
  modified_base 5: mod_base = OTHER; note = adenosine-3'-phosphate
  modified_base 6: mod_base = OTHER; note = guanosine-3'-phosphate
  modified_base 7: mod_base = OTHER; note = guanosine-3'-phosphate
  modified_base 8: mod_base = OTHER; note = guanosine-3'-phosphate
  modified_base 9: mod_base = OTHER; note = guanosine-3'-phosphate
  modified_base 10: mod_base = OTHER; note = cytidine-3'-phosphate
  modified_base 11: mod_base = OTHER; note = cytidine-3'-phosphate
  modified_base 12: mod_base = OTHER; note = cytidine-3'-phosphate
  modified_base 13: mod_base = OTHER; note = uridine-3'-phosphate
  modified_base 14: mod_base = OTHER; note = guanosine-3'-phosphate
  modified_base 15: mod_base = OTHER; note = guanosine-3'-phosphate
  modified_base 16: mod_base = OTHER; note = adenosine-3'-phosphate
  modified_base 17: mod_base = OTHER; note = guanosine-3'-phosphate
  modified_base 18: mod_base = OTHER; note = guanosine-3'-phosphate
  modified_base 19: mod_base = OTHER; note = cytidine-3'-phosphate
  misc_feature 1..19: note = RNA
  misc_feature 20..21: note = DNA
ctggaggggccctggaggctt

SEQ ID NO: 1253 - DNA, 21 bp, synthetic construct
  source 1..21: mol_type = other DNA
  modified_base 1: mod_base = OTHER; note = adenosine-3'-phosphate
  modified_base 2: mod_base = OTHER; note = adenosine-3'-phosphate
  modified_base 3: mod_base = OTHER; note = cytidine-3'-phosphate
  modified_base 4: mod_base = OTHER; note = adenosine-3'-phosphate
  modified_base 5: mod_base = OTHER; note = adenosine-3'-phosphate
  modified_base 6: mod_base = OTHER; note = uridine-3'-phosphate
  modified_base 7: mod_base = OTHER; note = guanosine-3'-phosphate
  modified_base 8: mod_base = OTHER; note = cytidine-3'-phosphate
  modified_base 9: mod_base = OTHER; note = guanosine-3'-phosphate
  modified_base 10: mod_base = OTHER; note = guanosine-3'-phosphate
  modified_base 11: mod_base = OTHER; note = cytidine-3'-phosphate
  modified_base 12: mod_base = OTHER; note = uridine-3'-phosphate
  modified_base 13: mod_base = OTHER; note = guanosine-3'-phosphate
  modified_base 14: mod_base = OTHER; note = guanosine-3'-phosphate
  modified_base 15: mod_base = OTHER; note = adenosine-3'-phosphate
  modified_base 16: mod_base = OTHER; note = guanosine-3'-phosphate
  modified_base 17: mod_base = OTHER; note = guanosine-3'-phosphate
  modified_base 18: mod_base = OTHER; note = guanosine-3'-phosphate
  modified_base 19: mod_base = OTHER; note = guanosine-3'-phosphate
  misc_feature 1..19: note = RNA
  misc_feature 20..21: note = DNA
aacaatgcggctggaggggtt

SEQ ID NO: 1254 - DNA, 21 bp, synthetic construct
  source 1..21: mol_type = other DNA
  modified_base 1: mod_base = OTHER; note = adenosine-3'-phosphate
  modified_base 2: mod_base = OTHER; note = guanosine-3'-phosphate
  modified_base 3: mod_base = OTHER; note = cytidine-3'-phosphate
  modified_base 4: mod_base = OTHER; note = uridine-3'-phosphate
  modified_base 5: mod_base = OTHER; note = cytidine-3'-phosphate
  modified_base 6: mod_base = OTHER; note = cytidine-3'-phosphate
  modified_base 7: mod_base = OTHER; note = adenosine-3'-phosphate
  modified_base 8: mod_base = OTHER; note = cytidine-3'-phosphate
  modified_base 9: mod_base = OTHER; note = cytidine-3'-phosphate
  modified_base 10: mod_base = OTHER; note = adenosine-3'-phosphate
  modified_base 11: mod_base = OTHER; note = adenosine-3'-phosphate
  modified_base 12: mod_base = OTHER; note = cytidine-3'-phosphate
  modified_base 13: mod_base = OTHER; note = adenosine-3'-phosphate
  modified_base 14: mod_base = OTHER; note = adenosine-3'-phosphate
  modified_base 15: mod_base = OTHER; note = uridine-3'-phosphate
  modified_base 16: mod_base = OTHER; note = guanosine-3'-phosphate
  modified_base 17: mod_base = OTHER; note = cytidine-3'-phosphate
  modified_base 18: mod_base = OTHER; note = guanosine-3'-phosphate
  modified_base 19: mod_base = OTHER; note = guanosine-3'-phosphate
  misc_feature 1..19: note = RNA
  misc_feature 20..21: note = DNA
agctccaccaacaatgcggtt

SEQ ID NO: 1255 - DNA, 21 bp, synthetic construct
  source 1..21: mol_type = other DNA
  modified_base 1: mod_base = OTHER; note = uridine-3'-phosphate
  modified_base 2: mod_base = OTHER; note = cytidine-3'-phosphate
  modified_base 3: mod_base = OTHER; note = guanosine-3'-phosphate
  modified_base 4: mod_base = OTHER; note = guanosine-3'-phosphate
  modified_base 5: mod_base = OTHER; note = adenosine-3'-phosphate
  modified_base 6: mod_base = OTHER; note = guanosine-3'-phosphate
  modified_base 7: mod_base = OTHER; note = guanosine-3'-phosphate
  modified_base 8: mod_base = OTHER; note = adenosine-3'-phosphate
  modified_base 9: mod_base = OTHER; note = cytidine-3'-phosphate
  modified_base 10: mod_base = OTHER; note = adenosine-3'-phosphate
  modified_base 11: mod_base = OTHER; note = cytidine-3'-phosphate
  modified_base 12: mod_base = OTHER; note = adenosine-3'-phosphate
  modified_base 13: mod_base = OTHER; note = guanosine-3'-phosphate
  modified_base 14: mod_base = OTHER; note = cytidine-3'-phosphate
  modified_base 15: mod_base = OTHER; note = uridine-3'-phosphate
  modified_base 16: mod_base = OTHER; note = cytidine-3'-phosphate
  modified_base 17: mod_base = OTHER; note = cytidine-3'-phosphate
  modified_base 18: mod_base = OTHER; note = adenosine-3'-phosphate
  modified_base 19: mod_base = OTHER; note = cytidine-3'-phosphate
  misc_feature 1..19: note = RNA
  misc_feature 20..21: note = DNA
tcggaggacacagctccactt

SEQ ID NO: 1256 - DNA, 21 bp, synthetic construct
  source 1..21: mol_type = other DNA
  modified_base 1: mod_base = OTHER; note = uridine-3'-phosphate
  modified_base 2: mod_base = OTHER; note = guanosine-3'-phosphate
  modified_base 3: mod_base = OTHER; note = guanosine-3'-phosphate
  modified_base 4: mod_base = OTHER; note = cytidine-3'-phosphate
  modified_base 5: mod_base = OTHER; note = cytidine-3'-phosphate
  modified_base 6: mod_base = OTHER; note = adenosine-3'-phosphate
  modified_base 7: mod_base = OTHER; note = cytidine-3'-phosphate
  modified_base 8: mod_base = OTHER; note = uridine-3'-phosphate
  modified_base 9: mod_base = OTHER; note = cytidine-3'-phosphate
  modified_base 10: mod_base = OTHER; note = adenosine-3'-phosphate
  modified_base 11: mod_base = OTHER; note = cytidine-3'-phosphate
  modified_base 12: mod_base = OTHER; note = cytidine-3'-phosphate
  modified_base 13: mod_base = OTHER; note = cytidine-3'-phosphate
  modified_base 14: mod_base = OTHER; note = uridine-3'-phosphate
  modified_base 15: mod_base = OTHER; note = cytidine-3'-phosphate
  modified_base 16: mod_base = OTHER; note = guanosine-3'-phosphate
  modified_base 17: mod_base = OTHER; note = guanosine-3'-phosphate
  modified_base 18: mod_base = OTHER; note = adenosine-3'-phosphate
  modified_base 19: mod_base = OTHER; note = guanosine-3'-phosphate
  misc_feature 1..19: note = RNA
  misc_feature 20..21: note = DNA
tggccactcaccctcggagtt

SEQ ID NO: 1257 - DNA, 21 bp, synthetic construct
  source 1..21: mol_type = other DNA
  modified_base 1: mod_base = OTHER; note = cytidine-3'-phosphate
  modified_base 2: mod_base = OTHER; note = uridine-3'-phosphate
  modified_base 3: mod_base = OTHER; note = guanosine-3'-phosphate
  modified_base 4: mod_base = OTHER; note = cytidine-3'-phosphate
  modified_base 5: mod_base = OTHER; note = cytidine-3'-phosphate
  modified_base 6: mod_base = OTHER; note = adenosine-3'-phosphate
  modified_base 7: mod_base = OTHER; note = uridine-3'-phosphate
  modified_base 8: mod_base = OTHER; note = guanosine-3'-phosphate
  modified_base 9: mod_base = OTHER; note = guanosine-3'-phosphate
  modified_base 10: mod_base = OTHER; note = cytidine-3'-phosphate
  modified_base 11: mod_base = OTHER; note = cytidine-3'-phosphate
  modified_base 12: mod_base = OTHER; note = adenosine-3'-phosphate
  modified_base 13: mod_base = OTHER; note = cytidine-3'-phosphate
  modified_base 14: mod_base = OTHER; note = uridine-3'-phosphate
  modified_base 15: mod_base = OTHER; note = cytidine-3'-phosphate
  modified_base 16: mod_base = OTHER; note = adenosine-3'-phosphate
  modified_base 17: mod_base = OTHER; note = cytidine-3'-phosphate
  modified_base 18: mod_base = OTHER; note = cytidine-3'-phosphate
  modified_base 19: mod_base = OTHER; note = cytidine-3'-phosphate
  misc_feature 1..19: note = RNA
  misc_feature 20..21: note = DNA
ctgccatggccactcaccctt

SEQ ID NO: 1258 - DNA, 21 bp, synthetic construct
  source 1..21: mol_type = other DNA
  modified_base 1: mod_base = OTHER; note = cytidine-3'-phosphate
  modified_base 2: mod_base = OTHER; note = uridine-3'-phosphate
  modified_base 3: mod_base = OTHER; note = guanosine-3'-phosphate
  modified_base 4: mod_base = OTHER; note = guanosine-3'-phosphate
  modified_base 5: mod_base = OTHER; note = adenosine-3'-phosphate
  modified_base 6: mod_base = OTHER; note = guanosine-3'-phosphate
  modified_base 7: mod_base = OTHER; note = guanosine-3'-phosphate
  modified_base 8: mod_base = OTHER; note = cytidine-3'-phosphate
  modified_base 9: mod_base = OTHER; note = uridine-3'-phosphate
  modified_base 10: mod_base = OTHER; note = guanosine-3'-phosphate
  modified_base 11: mod_base = OTHER; note = guanosine-3'-phosphate
  modified_base 12: mod_base = OTHER; note = cytidine-3'-phosphate
  modified_base 13: mod_base = OTHER; note = cytidine-3'-phosphate
  modified_base 14: mod_base = OTHER; note = uridine-3'-phosphate
  modified_base 15: mod_base = OTHER; note = guanosine-3'-phosphate
  modified_base 16: mod_base = OTHER; note = cytidine-3'-phosphate
  modified_base 17: mod_base = OTHER; note = cytidine-3'-phosphate
  modified_base 18: mod_base = OTHER; note = adenosine-3'-phosphate
  modified_base 19: mod_base = OTHER; note = uridine-3'-phosphate
  misc_feature 1..19: note = RNA
  misc_feature 20..21: note = DNA
ctggaggctggcctgccattt

SEQ ID NO: 1259 - DNA, 21 bp, synthetic construct
  source 1..21: mol_type = other DNA
  modified_base 1: mod_base = OTHER; note = uridine-3'-phosphate
  modified_base 2: mod_base = OTHER; note = cytidine-3'-phosphate
  modified_base 3: mod_base = OTHER; note = guanosine-3'-phosphate
  modified_base 4: mod_base = OTHER; note = adenosine-3'-phosphate
  modified_base 5: mod_base = OTHER; note = cytidine-3'-phosphate
  modified_base 6: mod_base = OTHER; note = cytidine-3'-phosphate
  modified_base 7: mod_base = OTHER; note = cytidine-3'-phosphate
  modified_base 8: mod_base = OTHER; note = cytidine-3'-phosphate
  modified_base 9: mod_base = OTHER; note = guanosine-3'-phosphate
  modified_base 10: mod_base = OTHER; note = adenosine-3'-phosphate
  modified_base 11: mod_base = OTHER; note = adenosine-3'-phosphate
  modified_base 12: mod_base = OTHER; note = cytidine-3'-phosphate
  modified_base 13: mod_base = OTHER; note = cytidine-3'-phosphate
  modified_base 14: mod_base = OTHER; note = uridine-3'-phosphate
  modified_base 15: mod_base = OTHER; note = guanosine-3'-phosphate
  modified_base 16: mod_base = OTHER; note = guanosine-3'-phosphate
  modified_base 17: mod_base = OTHER; note = adenosine-3'-phosphate
  modified_base 18: mod_base = OTHER; note = guanosine-3'-phosphate
  modified_base 19: mod_base = OTHER; note = guanosine-3'-phosphate
  misc_feature 1..19: note = RNA
  misc_feature 20..21: note = DNA
tcgaccccgaacctggaggtt

SEQ ID NO: 1260 - DNA, 21 bp, synthetic construct
  source 1..21: mol_type = other DNA
  modified_base 1: mod_base = OTHER; note = guanosine-3'-phosphate
  modified_base 2: mod_base = OTHER; note = adenosine-3'-phosphate
  modified_base 3: mod_base = OTHER; note = uridine-3'-phosphate
  modified_base 4: mod_base = OTHER; note = guanosine-3'-phosphate
  modified_base 5: mod_base = OTHER; note = uridine-3'-phosphate
  modified_base 6: mod_base = OTHER; note = guanosine-3'-phosphate
  modified_base 7: mod_base = OTHER; note = uridine-3'-phosphate
  modified_base 8: mod_base = OTHER; note = cytidine-3'-phosphate
  modified_base 9: mod_base = OTHER; note = guanosine-3'-phosphate
  modified_base 10: mod_base = OTHER; note = adenosine-3'-phosphate
  modified_base 11: mod_base = OTHER; note = cytidine-3'-phosphate
  modified_base 12: mod_base = OTHER; note = cytidine-3'-phosphate
  modified_base 13: mod_base = OTHER; note = cytidine-3'-phosphate
  modified_base 14: mod_base = OTHER; note = cytidine-3'-phosphate
  modified_base 15: mod_base = OTHER; note = guanosine-3'-phosphate
  modified_base 16: mod_base = OTHER; note = adenosine-3'-phosphate
  modified_base 17: mod_base = OTHER; note = adenosine-3'-phosphate
  modified_base 18: mod_base = OTHER; note = cytidine-3'-phosphate
  modified_base 19: mod_base = OTHER; note = cytidine-3'-phosphate
  misc_feature 1..19: note = RNA
  misc_feature 20..21: note = DNA
gatgtgtcgaccccgaacctt

SEQ ID NO: 1261 - DNA, 21 bp, synthetic construct
  source 1..21: mol_type = other DNA
  modified_base 1: mod_base = OTHER; note = adenosine-3'-phosphate
  modified_base 2: mod_base = OTHER; note = guanosine-3'-phosphate
  modified_base 3: mod_base = OTHER; note = guanosine-3'-phosphate
  modified_base 4: mod_base = OTHER; note = guanosine-3'-phosphate
  modified_base 5: mod_base = OTHER; note = cytidine-3'-phosphate
  modified_base 6: mod_base = OTHER; note = cytidine-3'-phosphate
  modified_base 7: mod_base = OTHER; note = cytidine-3'-phosphate
  modified_base 8: mod_base = OTHER; note = cytidine-3'-phosphate
  modified_base 9: mod_base = OTHER; note = cytidine-3'-phosphate
  modified_base 10: mod_base = OTHER; note = cytidine-3'-phosphate
  modified_base 11: mod_base = OTHER; note = cytidine-3'-phosphate
  modified_base 12: mod_base = OTHER; note = adenosine-3'-phosphate
  modified_base 13: mod_base = OTHER; note = cytidine-3'-phosphate
  modified_base 14: mod_base = OTHER; note = adenosine-3'-phosphate
  modified_base 15: mod_base = OTHER; note = guanosine-3'-phosphate
  modified_base 16: mod_base = OTHER; note = adenosine-3'-phosphate
  modified_base 17: mod_base = OTHER; note = uridine-3'-phosphate
  modified_base 18: mod_base = OTHER; note = guanosine-3'-phosphate
  modified_base 19: mod_base = OTHER; note = uridine-3'-phosphate
  misc_feature 1..19: note = RNA
  misc_feature 20..21: note = DNA
agggcccccccacagatgttt

SEQ ID NO: 1262 - DNA, 21 bp, synthetic construct
  source 1..21: mol_type = other DNA
  modified_base 1: mod_base = OTHER; note = guanosine-3'-phosphate
  modified_base 2: mod_base = OTHER; note = cytidine-3'-phosphate
  modified_base 3: mod_base = OTHER; note = guanosine-3'-phosphate
  modified_base 4: mod_base = OTHER; note = adenosine-3'-phosphate
  modified_base 5: mod_base = OTHER; note = uridine-3'-phosphate
  modified_base 6: mod_base = OTHER; note = guanosine-3'-phosphate
  modified_base 7: mod_base = OTHER; note = adenosine-3'-phosphate
  modified_base 8: mod_base = OTHER; note = guanosine-3'-phosphate
  modified_base 9: mod_base = OTHER; note = guanosine-3'-phosphate
  modified_base 10: mod_base = OTHER; note = guanosine-3'-phosphate
  modified_base 11: mod_base = OTHER; note = cytidine-3'-phosphate
  modified_base 12: mod_base = OTHER; note = cytidine-3'-phosphate
  modified_base 13: mod_base = OTHER; note = cytidine-3'-phosphate
  modified_base 14: mod_base = OTHER; note = cytidine-3'-phosphate
  modified_base 15: mod_base = OTHER; note = cytidine-3'-phosphate
  modified_base 16: mod_base = OTHER; note = cytidine-3'-phosphate
  modified_base 17: mod_base = OTHER; note = cytidine-3'-phosphate
  modified_base 18: mod_base = OTHER; note = adenosine-3'-phosphate
  modified_base 19: mod_base = OTHER; note = cytidine-3'-phosphate
  misc_feature 1..19: note = RNA
  misc_feature 20..21: note = DNA
gcgatgagggcccccccactt

SEQ ID NO: 1263 - DNA, 21 bp, synthetic construct
  source 1..21: mol_type = other DNA
  modified_base 1: mod_base = OTHER; note = uridine-3'-phosphate
  modified_base 2: mod_base = OTHER; note = cytidine-3'-phosphate
  modified_base 3: mod_base = OTHER; note = adenosine-3'-phosphate
  modified_base 4: mod_base = OTHER; note = cytidine-3'-phosphate
  modified_base 5: mod_base = OTHER; note = cytidine-3'-phosphate
  modified_base 6: mod_base = OTHER; note = cytidine-3'-phosphate
  modified_base 7: mod_base = OTHER; note = adenosine-3'-phosphate
  modified_base 8: mod_base = OTHER; note = guanosine-3'-phosphate
  modified_base 9: mod_base = OTHER; note = cytidine-3'-phosphate
  modified_base 10: mod_base = OTHER; note = guanosine-3'-phosphate
  modified_base 11: mod_base = OTHER; note = guanosine-3'-phosphate
  modified_base 12: mod_base = OTHER; note = uridine-3'-phosphate
  modified_base 13: mod_base = OTHER; note = cytidine-3'-phosphate
  modified_base 14: mod_base = OTHER; note = adenosine-3'-phosphate
  modified_base 15: mod_base = OTHER; note = guanosine-3'-phosphate
  modified_base 16: mod_base = OTHER; note = cytidine-3'-phosphate
  modified_base 17: mod_base = OTHER; note = guanosine-3'-phosphate
  modified_base 18: mod_base = OTHER; note = adenosine-3'-phosphate
  modified_base 19: mod_base = OTHER; note = uridine-3'-phosphate
  misc_feature 1..19: note = RNA
  misc_feature 20..21: note = DNA
tcacccagcggtcagcgattt

SEQ ID NO: 1264 - DNA, 21 bp, synthetic construct
  source 1..21: mol_type = other DNA
  modified_base 1: mod_base = OTHER; note = guanosine-3'-phosphate
  modified_base 2: mod_base = OTHER; note = cytidine-3'-phosphate
  modified_base 3: mod_base = OTHER; note = uridine-3'-phosphate
  modified_base 4: mod_base = OTHER; note = guanosine-3'-phosphate
  modified_base 5: mod_base = OTHER; note = uridine-3'-phosphate
  modified_base 6: mod_base = OTHER; note = uridine-3'-phosphate
  modified_base 7: mod_base = OTHER; note = adenosine-3'-phosphate
  modified_base 8: mod_base = OTHER; note = uridine-3'-phosphate
  modified_base 9: mod_base = OTHER; note = cytidine-3'-phosphate
  modified_base 10: mod_base = OTHER; note = adenosine-3'-phosphate
  modified_base 11: mod_base = OTHER; note = cytidine-3'-phosphate
  modified_base 12: mod_base = OTHER; note = cytidine-3'-phosphate
  modified_base 13: mod_base = OTHER; note = cytidine-3'-phosphate
  modified_base 14: mod_base = OTHER; note = adenosine-3'-phosphate
  modified_base 15: mod_base = OTHER; note = guanosine-3'-phosphate
  modified_base 16: mod_base = OTHER; note = cytidine-3'-phosphate
  modified_base 17: mod_base = OTHER; note = guanosine-3'-phosphate
  modified_base 18: mod_base = OTHER; note = guanosine-3'-phosphate
  modified_base 19: mod_base = OTHER; note = uridine-3'-phosphate
  misc_feature 1..19: note = RNA
  misc_feature 20..21: note = DNA
gctgttatcacccagcggttt

SEQ ID NO: 1265 - DNA, 21 bp, synthetic construct
  source 1..21: mol_type = other DNA
  modified_base 1: mod_base = OTHER; note = cytidine-3'-phosphate
  modified_base 2: mod_base = OTHER; note = adenosine-3'-phosphate
  modified_base 3: mod_base = OTHER; note = guanosine-3'-phosphate
  modified_base 4: mod_base = OTHER; note = uridine-3'-phosphate
  modified_base 5: mod_base = OTHER; note = guanosine-3'-phosphate
  modified_base 6: mod_base = OTHER; note = guanosine-3'-phosphate
  modified_base 7: mod_base = OTHER; note = guanosine-3'-phosphate
  modified_base 8: mod_base = OTHER; note = cytidine-3'-phosphate
  modified_base 9: mod_base = OTHER; note = adenosine-3'-phosphate
  modified_base 10: mod_base = OTHER; note = guanosine-3'-phosphate
  modified_base 11: mod_base = OTHER; note = cytidine-3'-phosphate
  modified_base 12: mod_base = OTHER; note = uridine-3'-phosphate
  modified_base 13: mod_base = OTHER; note = guanosine-3'-phosphate
  modified_base 14: mod_base = OTHER; note = uridine-3'-phosphate
  modified_base 15: mod_base = OTHER; note = uridine-3'-phosphate
  modified_base 16: mod_base = OTHER; note = adenosine-3'-phosphate
  modified_base 17: mod_base = OTHER; note = uridine-3'-phosphate
  modified_base 18: mod_base = OTHER; note = cytidine-3'-phosphate
  modified_base 19: mod_base = OTHER; note = adenosine-3'-phosphate
  misc_feature 1..19: note = RNA
  misc_feature 20..21: note = DNA
cagtgggcagctgttatcatt

SEQ ID NO: 1266 - DNA, 21 bp, synthetic construct
  source 1..21: mol_type = other DNA
  modified_base 1: mod_base = OTHER; note = uridine-3'-phosphate
  modified_base 2: mod_base = OTHER; note = cytidine-3'-phosphate
  modified_base 3: mod_base = OTHER; note = cytidine-3'-phosphate
  modified_base 4: mod_base = OTHER; note = uridine-3'-phosphate
  modified_base 5: mod_base = OTHER; note = cytidine-3'-phosphate
  modified_base 6: mod_base = OTHER; note = cytidine-3'-phosphate
  modified_base 7: mod_base = OTHER; note = uridine-3'-phosphate
  modified_base 8: mod_base = OTHER; note = guanosine-3'-phosphate
  modified_base 9: mod_base = OTHER; note = guanosine-3'-phosphate
  modified_base 10: mod_base = OTHER; note = adenosine-3'-phosphate
  modified_base 11: mod_base = OTHER; note = adenosine-3'-phosphate
  modified_base 12: mod_base = OTHER; note = guanosine-3'-phosphate
  modified_base 13: mod_base = OTHER; note = cytidine-3'-phosphate
  modified_base 14: mod_base = OTHER; note = adenosine-3'-phosphate
  modified_base 15: mod_base = OTHER; note = guanosine-3'-phosphate
  modified_base 16: mod_base = OTHER; note = uridine-3'-phosphate
  modified_base 17: mod_base = OTHER; note = guanosine-3'-phosphate
  modified_base 18: mod_base = OTHER; note = guanosine-3'-phosphate
  modified_base 19: mod_base = OTHER; note = guanosine-3'-phosphate
  misc_feature 1..19: note = RNA
  misc_feature 20..21: note = DNA
tcctcctggaagcagtgggtt

SEQ ID NO: 1267 - DNA, 21 bp, synthetic construct
  source 1..21: mol_type = other DNA
  modified_base 1: mod_base = OTHER; note = guanosine-3'-phosphate
  modified_base 2: mod_base = OTHER; note = guanosine-3'-phosphate
  modified_base 3: mod_base = OTHER; note = cytidine-3'-phosphate
  modified_base 4: mod_base = OTHER; note = cytidine-3'-phosphate
  modified_base 5: mod_base = OTHER; note = adenosine-3'-phosphate
  modified_base 6: mod_base = OTHER; note = uridine-3'-phosphate
  modified_base 7: mod_base = OTHER; note = guanosine-3'-phosphate
  modified_base 8: mod_base = OTHER; note = cytidine-3'-phosphate
  modified_base 9: mod_base = OTHER; note = uridine-3'-phosphate
  modified_base 10: mod_base = OTHER; note = guanosine-3'-phosphate
  modified_base 11: mod_base = OTHER; note = uridine-3'-phosphate
  modified_base 12: mod_base = OTHER; note = cytidine-3'-phosphate
  modified_base 13: mod_base = OTHER; note = cytidine-3'-phosphate
  modified_base 14: mod_base = OTHER; note = uridine-3'-phosphate
  modified_base 15: mod_base = OTHER; note = cytidine-3'-phosphate
  modified_base 16: mod_base = OTHER; note = cytidine-3'-phosphate
  modified_base 17: mod_base = OTHER; note = uridine-3'-phosphate
  modified_base 18: mod_base = OTHER; note = guanosine-3'-phosphate
  modified_base 19: mod_base = OTHER; note = guanosine-3'-phosphate
  misc_feature 1..19: note = RNA
  misc_feature 20..21: note = DNA
ggccatgctgtcctcctggtt

SEQ ID NO: 1268 - DNA, 21 bp, synthetic construct
  source 1..21: mol_type = other DNA
  modified_base 1: mod_base = OTHER; note = adenosine-3'-phosphate
  modified_base 2: mod_base = OTHER; note = cytidine-3'-phosphate
  modified_base 3: mod_base = OTHER; note = cytidine-3'-phosphate
  modified_base 4: mod_base = OTHER; note = guanosine-3'-phosphate
  modified_base 5: mod_base = OTHER; note = uridine-3'-phosphate
  modified_base 6: mod_base = OTHER; note = guanosine-3'-phosphate
  modified_base 7: mod_base = OTHER; note = guanosine-3'-phosphate
  modified_base 8: mod_base = OTHER; note = adenosine-3'-phosphate
  modified_base 9: mod_base = OTHER; note = guanosine-3'-phosphate
  modified_base 10: mod_base = OTHER; note = guanosine-3'-phosphate
  modified_base 11: mod_base = OTHER; note = cytidine-3'-phosphate
  modified_base 12: mod_base = OTHER; note = cytidine-3'-phosphate
  modified_base 13: mod_base = OTHER; note = adenosine-3'-phosphate
  modified_base 14: mod_base = OTHER; note = uridine-3'-phosphate
  modified_base 15: mod_base = OTHER; note = guanosine-3'-phosphate
  modified_base 16: mod_base = OTHER; note = cytidine-3'-phosphate
  modified_base 17: mod_base = OTHER; note = uridine-3'-phosphate
  modified_base 18: mod_base = OTHER; note = guanosine-3'-phosphate
  modified_base 19: mod_base = OTHER; note = uridine-3'-phosphate
  misc_feature 1..19: note = RNA
  misc_feature 20..21: note = DNA
accgtggaggccatgctgttt

SEQ ID NO: 1269 - DNA, 21 bp, synthetic construct
  source 1..21: mol_type = other DNA
  modified_base 1: mod_base = OTHER; note = adenosine-3'-phosphate
  modified_base 2: mod_base = OTHER; note = cytidine-3'-phosphate
  modified_base 3: mod_base = OTHER; note = guanosine-3'-phosphate
  modified_base 4: mod_base = OTHER; note = guanosine-3'-phosphate
  modified_base 5: mod_base = OTHER; note = uridine-3'-phosphate
  modified_base 6: mod_base = OTHER; note = cytidine-3'-phosphate
  modified_base 7: mod_base = OTHER; note = cytidine-3'-phosphate
  modified_base 8: mod_base = OTHER; note = adenosine-3'-phosphate
  modified_base 9: mod_base = OTHER; note = cytidine-3'-phosphate
  modified_base 10: mod_base = OTHER; note = adenosine-3'-phosphate
  modified_base 11: mod_base = OTHER; note = guanosine-3'-phosphate
  modified_base 12: mod_base = OTHER; note = cytidine-3'-phosphate
  modified_base 13: mod_base = OTHER; note = adenosine-3'-phosphate
  modified_base 14: mod_base = OTHER; note = cytidine-3'-phosphate
  modified_base 15: mod_base = OTHER; note = cytidine-3'-phosphate
  modified_base 16: mod_base = OTHER; note = guanosine-3'-phosphate
  modified_base 17: mod_base = OTHER; note = uridine-3'-phosphate
  modified_base 18: mod_base = OTHER; note = guanosine-3'-phosphate
  modified_base 19: mod_base = OTHER; note = guanosine-3'-phosphate
  misc_feature 1..19: note = RNA
  misc_feature 20..21: note = DNA
acggtccacagcaccgtggtt

SEQ ID NO: 1270 - DNA, 21 bp, synthetic construct
  source 1..21: mol_type = other DNA
  modified_base 1: mod_base = OTHER; note = uridine-3'-phosphate
  modified_base 2: mod_base = OTHER; note = uridine-3'-phosphate
  modified_base 3: mod_base = OTHER; note = guanosine-3'-phosphate
  modified_base 4: mod_base = OTHER; note = cytidine-3'-phosphate
  modified_base 5: mod_base = OTHER; note = cytidine-3'-phosphate
  modified_base 6: mod_base = OTHER; note = cytidine-3'-phosphate
  modified_base 7: mod_base = OTHER; note = adenosine-3'-phosphate
  modified_base 8: mod_base = OTHER; note = guanosine-3'-phosphate
  modified_base 9: mod_base = OTHER; note = guanosine-3'-phosphate
  modified_base 10: mod_base = OTHER; note = adenosine-3'-phosphate
  modified_base 11: mod_base = OTHER; note = adenosine-3'-phosphate
  modified_base 12: mod_base = OTHER; note = cytidine-3'-phosphate
  modified_base 13: mod_base = OTHER; note = adenosine-3'-phosphate
  modified_base 14: mod_base = OTHER; note = cytidine-3'-phosphate
  modified_base 15: mod_base = OTHER; note = guanosine-3'-phosphate
  modified_base 16: mod_base = OTHER; note = guanosine-3'-phosphate
  modified_base 17: mod_base = OTHER; note = uridine-3'-phosphate
  modified_base 18: mod_base = OTHER; note = cytidine-3'-phosphate
  modified_base 19: mod_base = OTHER; note = cytidine-3'-phosphate
  misc_feature 1..19: note = RNA
  misc_feature 20..21: note = DNA
ttgcccaggaacacggtcctt

SEQ ID NO: 1271 - DNA, 21 bp, synthetic construct
  source 1..21: mol_type = other DNA
  modified_base 1: mod_base = OTHER; note = uridine-3'-phosphate
  modified_base 2: mod_base = OTHER; note = guanosine-3'-phosphate
  modified_base 3: mod_base = OTHER; note = cytidine-3'-phosphate
  modified_base 4: mod_base = OTHER; note = cytidine-3'-phosphate
  modified_base 5: mod_base = OTHER; note = adenosine-3'-phosphate
  modified_base 6: mod_base = OTHER; note = cytidine-3'-phosphate
  modified_base 7: mod_base = OTHER; note = adenosine-3'-phosphate
  modified_base 8: mod_base = OTHER; note = cytidine-3'-phosphate
  modified_base 9: mod_base = OTHER; note = cytidine-3'-phosphate
  modified_base 10: mod_base = OTHER; note = uridine-3'-phosphate
  modified_base 11: mod_base = OTHER; note = uridine-3'-phosphate
  modified_base 12: mod_base = OTHER; note = guanosine-3'-phosphate
  modified_base 13: mod_base = OTHER; note = cytidine-3'-phosphate
  modified_base 14: mod_base = OTHER; note = cytidine-3'-phosphate
  modified_base 15: mod_base = OTHER; note = cytidine-3'-phosphate
  modified_base 16: mod_base = OTHER; note = adenosine-3'-phosphate
  modified_base 17: mod_base = OTHER; note = guanosine-3'-phosphate
  modified_base 18: mod_base = OTHER; note = guanosine-3'-phosphate
  modified_base 19: mod_base = OTHER; note = adenosine-3'-phosphate
  misc_feature 1..19: note = RNA
  misc_feature 20..21: note = DNA
tgccacaccttgcccaggatt

SEQ ID NO: 1272 - DNA, 21 bp, synthetic construct
  source 1..21: mol_type = other DNA
  modified_base 1: mod_base = OTHER; note = adenosine-3'-phosphate
  modified_base 2: mod_base = OTHER; note = guanosine-3'-phosphate
  modified_base 3: mod_base = OTHER; note = cytidine-3'-phosphate
  modified_base 4: mod_base = OTHER; note = guanosine-3'-phosphate
  modified_base 5: mod_base = OTHER; note = cytidine-3'-phosphate
  modified_base 6: mod_base = OTHER; note = guanosine-3'-phosphate
  modified_base 7: mod_base = OTHER; note = adenosine-3'-phosphate
  modified_base 8: mod_base = OTHER; note = guanosine-3'-phosphate
  modified_base 9: mod_base = OTHER; note = uridine-3'-phosphate
  modified_base 10: mod_base = OTHER; note = uridine-3'-phosphate
  modified_base 11: mod_base = OTHER; note = cytidine-3'-phosphate
  modified_base 12: mod_base = OTHER; note = uridine-3'-phosphate
  modified_base 13: mod_base = OTHER; note = guanosine-3'-phosphate
  modified_base 14: mod_base = OTHER; note = cytidine-3'-phosphate
  modified_base 15: mod_base = OTHER; note = cytidine-3'-phosphate
  modified_base 16: mod_base = OTHER; note = adenosine-3'-phosphate
  modified_base 17: mod_base = OTHER; note = cytidine-3'-phosphate
  modified_base 18: mod_base = OTHER; note = adenosine-3'-phosphate
  modified_base 19: mod_base = OTHER; note = cytidine-3'-phosphate
  misc_feature 1..19: note = RNA
  misc_feature 20..21: note = DNA
agcgcgagttctgccacactt

SEQ ID NO: 1273 - DNA, 21 bp, synthetic construct
  source 1..21: mol_type = other DNA
  modified_base 1: mod_base = OTHER; note = uridine-3'-phosphate
  modified_base 2: mod_base = OTHER; note = cytidine-3'-phosphate
  modified_base 3: mod_base = OTHER; note = cytidine-3'-phosphate
  modified_base 4: mod_base = OTHER; note = adenosine-3'-phosphate
  modified_base 5: mod_base = OTHER; note = guanosine-3'-phosphate
  modified_base 6: mod_base = OTHER; note = guanosine-3'-phosphate
  modified_base 7: mod_base = OTHER; note = cytidine-3'-phosphate
  modified_base 8: mod_base = OTHER; note = cytidine-3'-phosphate
  modified_base 9: mod_base = OTHER; note = adenosine-3'-phosphate
  modified_base 10: mod_base = OTHER; note = guanosine-3'-phosphate
  modified_base 11: mod_base = OTHER; note = cytidine-3'-phosphate
  modified_base 12: mod_base = OTHER; note = guanosine-3'-phosphate
  modified_base 13: mod_base = OTHER; note = cytidine-3'-phosphate
  modified_base 14: mod_base = OTHER; note = guanosine-3'-phosphate
  modified_base 15: mod_base = OTHER; note = adenosine-3'-phosphate
  modified_base 16: mod_base = OTHER; note = guanosine-3'-phosphate
  modified_base 17: mod_base = OTHER; note = uridine-3'-phosphate
  modified_base 18: mod_base = OTHER; note = uridine-3'-phosphate
  modified_base 19: mod_base = OTHER; note = cytidine-3'-phosphate
  misc_feature 1..19: note = RNA
  misc_feature 20..21: note = DNA
tccaggccagcgcgagttctt

SEQ ID NO: 1274 - DNA, 21 bp, synthetic construct
  source 1..21: mol_type = other DNA
  modified_base 1: mod_base = OTHER; note = adenosine-3'-phosphate
  modified_base 2: mod_base = OTHER; note = adenosine-3'-phosphate
  modified_base 3: mod_base = OTHER; note = guanosine-3'-phosphate
  modified_base 4: mod_base = OTHER; note = guanosine-3'-phosphate
  modified_base 5: mod_base = OTHER; note = adenosine-3'-phosphate
  modified_base 6: mod_base = OTHER; note = cytidine-3'-phosphate
  modified_base 7: mod_base = OTHER; note = adenosine-3'-phosphate
  modified_base 8: mod_base = OTHER; note = cytidine-3'-phosphate
  modified_base 9: mod_base = OTHER; note = cytidine-3'-phosphate
  modified_base 10: mod_base = OTHER; note = uridine-3'-phosphate
  modified_base 11: mod_base = OTHER; note = cytidine-3'-phosphate
  modified_base 12: mod_base = OTHER; note = uridine-3'-phosphate
  modified_base 13: mod_base = OTHER; note = cytidine-3'-phosphate
  modified_base 14: mod_base = OTHER; note = cytidine-3'-phosphate
  modified_base 15: mod_base = OTHER; note = adenosine-3'-phosphate
  modified_base 16: mod_base = OTHER; note = guanosine-3'-phosphate
  modified_base 17: mod_base = OTHER; note = guanosine-3'-phosphate
  modified_base 18: mod_base = OTHER; note = cytidine-3'-phosphate
  modified_base 19: mod_base = OTHER; note = cytidine-3'-phosphate
  misc_feature 1..19: note = RNA
  misc_feature 20..21: note = DNA
aaggacacctctccaggcctt

SEQ ID NO: 1275 - DNA, 21 bp, synthetic construct
  source 1..21: mol_type = other DNA
  modified_base 1: mod_base = OTHER; note = cytidine-3'-phosphate
  modified_base 2: mod_base = OTHER; note = uridine-3'-phosphate
  modified_base 3: mod_base = OTHER; note = cytidine-3'-phosphate
  modified_base 4: mod_base = OTHER; note = adenosine-3'-phosphate
  modified_base 5: mod_base = OTHER; note = cytidine-3'-phosphate
  modified_base 6: mod_base = OTHER; note = cytidine-3'-phosphate
  modified_base 7: mod_base = OTHER; note = uridine-3'-phosphate
  modified_base 8: mod_base = OTHER; note = uridine-3'-phosphate
  modified_base 9: mod_base = OTHER; note = guanosine-3'-phosphate
  modified_base 10: mod_base = OTHER; note = adenosine-3'-phosphate
  modified_base 11: mod_base = OTHER; note = adenosine-3'-phosphate
  modified_base 12: mod_base = OTHER; note = guanosine-3'-phosphate
  modified_base 13: mod_base = OTHER; note = guanosine-3'-phosphate
  modified_base 14: mod_base = OTHER; note = adenosine-3'-phosphate
  modified_base 15: mod_base = OTHER; note = cytidine-3'-phosphate
  modified_base 16: mod_base = OTHER; note = adenosine-3'-phosphate
  modified_base 17: mod_base = OTHER; note = cytidine-3'-phosphate
  modified_base 18: mod_base = OTHER; note = cytidine-3'-phosphate
  modified_base 19: mod_base = OTHER; note = uridine-3'-phosphate
  misc_feature 1..19: note = RNA
  misc_feature 20..21: note = DNA
ctcaccttgaaggacaccttt

SEQ ID NO: 1276 - DNA, 21 bp, synthetic construct
  source 1..21: mol_type = other DNA
  modified_base 1: mod_base = OTHER; note = guanosine-3'-phosphate
  modified_base 2: mod_base = OTHER; note = adenosine-3'-phosphate
  modified_base 3: mod_base = OTHER; note = guanosine-3'-phosphate
  modified_base 4: mod_base = OTHER; note = cytidine-3'-phosphate
  modified_base 5: mod_base = OTHER; note = adenosine-3'-phosphate
  modified_base 6: mod_base = OTHER; note = guanosine-3'-phosphate
  modified_base 7: mod_base = OTHER; note = guanosine-3'-phosphate
  modified_base 8: mod_base = OTHER; note = cytidine-3'-phosphate
  modified_base 9: mod_base = OTHER; note = guanosine-3'-phosphate
  modified_base 10: mod_base = OTHER; note = guanosine-3'-phosphate
  modified_base 11: mod_base = OTHER; note = cytidine-3'-phosphate
  modified_base 12: mod_base = OTHER; note = uridine-3'-phosphate
  modified_base 13: mod_base = OTHER; note = cytidine-3'-phosphate
  modified_base 14: mod_base = OTHER; note = adenosine-3'-phosphate
  modified_base 15: mod_base = OTHER; note = cytidine-3'-phosphate
  modified_base 16: mod_base = OTHER; note = cytidine-3'-phosphate
  modified_base 17: mod_base = OTHER; note = uridine-3'-phosphate
  modified_base 18: mod_base = OTHER; note = uridine-3'-phosphate
  modified_base 19: mod_base = OTHER; note = guanosine-3'-phosphate
  misc_feature 1..19: note = RNA
  misc_feature 20..21: note = DNA
gagcaggcggctcaccttgtt

SEQ ID NO: 1277 - DNA, 21 bp, synthetic construct
  source 1..21: mol_type = other DNA
  modified_base 1: mod_base = OTHER; note = uridine-3'-phosphate
  modified_base 2: mod_base = OTHER; note = adenosine-3'-phosphate
  modified_base 3: mod_base = OTHER; note = cytidine-3'-phosphate
  modified_base 4: mod_base = OTHER; note = guanosine-3'-phosphate
  modified_base 5: mod_base = OTHER; note = guanosine-3'-phosphate
  modified_base 6: mod_base = OTHER; note = guanosine-3'-phosphate
  modified_base 7: mod_base = OTHER; note = uridine-3'-phosphate
  modified_base 8: mod_base = OTHER; note = guanosine-3'-phosphate
  modified_base 9: mod_base = OTHER; note = cytidine-3'-phosphate
  modified_base 10: mod_base = OTHER; note = adenosine-3'-phosphate
  modified_base 11: mod_base = OTHER; note = guanosine-3'-phosphate
  modified_base 12: mod_base = OTHER; note = guanosine-3'-phosphate
  modified_base 13: mod_base = OTHER; note = adenosine-3'-phosphate
  modified_base 14: mod_base = OTHER; note = guanosine-3'-phosphate
  modified_base 15: mod_base = OTHER; note = cytidine-3'-phosphate
  modified_base 16: mod_base = OTHER; note = adenosine-3'-phosphate
  modified_base 17: mod_base = OTHER; note = guanosine-3'-phosphate
  modified_base 18: mod_base = OTHER; note = guanosine-3'-phosphate
  modified_base 19: mod_base = OTHER; note = cytidine-3'-phosphate
  misc_feature 1..19: note = RNA
  misc_feature 20..21: note = DNA
tacgggtgcaggagcaggctt

SEQ ID NO: 1278 - DNA, 21 bp, synthetic construct
  source 1..21: mol_type = other DNA
  modified_base 1: mod_base = OTHER; note = cytidine-3'-phosphate
  modified_base 2: mod_base = OTHER; note = uridine-3'-phosphate
  modified_base 3: mod_base = OTHER; note = cytidine-3'-phosphate
  modified_base 4: mod_base = OTHER; note = uridine-3'-phosphate
  modified_base 5: mod_base = OTHER; note = uridine-3'-phosphate
  modified_base 6: mod_base = OTHER; note = cytidine-3'-phosphate
  modified_base 7: mod_base = OTHER; note = guanosine-3'-phosphate
  modified_base 8: mod_base = OTHER; note = uridine-3'-phosphate
  modified_base 9: mod_base = OTHER; note = guanosine-3'-phosphate
  modified_base 10: mod_base = OTHER; note = guanosine-3'-phosphate
  modified_base 11: mod_base = OTHER; note = uridine-3'-phosphate
  modified_base 12: mod_base = OTHER; note = adenosine-3'-phosphate
  modified_base 13: mod_base = OTHER; note = cytidine-3'-phosphate
  modified_base 14: mod_base = OTHER; note = guanosine-3'-phosphate
  modified_base 15: mod_base = OTHER; note = guanosine-3'-phosphate
  modified_base 16: mod_base = OTHER; note = guanosine-3'-phosphate
  modified_base 17: mod_base = OTHER; note = uridine-3'-phosphate
  modified_base 18: mod_base = OTHER; note = guanosine-3'-phosphate
  modified_base 19: mod_base = OTHER; note = cytidine-3'-phosphate
  misc_feature 1..19: note = RNA
  misc_feature 20..21: note = DNA
ctcttcgtggtacgggtgctt

SEQ ID NO: 1279 - DNA, 21 bp, synthetic construct
  source 1..21: mol_type = other DNA
  modified_base 1: mod_base = OTHER; note = adenosine-3'-phosphate
  modified_base 2: mod_base = OTHER; note = uridine-3'-phosphate
  modified_base 3: mod_base = OTHER; note = guanosine-3'-phosphate
  modified_base 4: mod_base = OTHER; note = guanosine-3'-phosphate
  modified_base 5: mod_base = OTHER; note = cytidine-3'-phosphate
  modified_base 6: mod_base = OTHER; note = uridine-3'-phosphate
  modified_base 7: mod_base = OTHER; note = guanosine-3'-phosphate
  modified_base 8: mod_base = OTHER; note = uridine-3'-phosphate
  modified_base 9: mod_base = OTHER; note = cytidine-3'-phosphate
  modified_base 10: mod_base = OTHER; note = cytidine-3'-phosphate
  modified_base 11: mod_base = OTHER; note = uridine-3'-phosphate
  modified_base 12: mod_base = OTHER; note = cytidine-3'-phosphate
  modified_base 13: mod_base = OTHER; note = uridine-3'-phosphate
  modified_base 14: mod_base = OTHER; note = uridine-3'-phosphate
  modified_base 15: mod_base = OTHER; note = cytidine-3'-phosphate
  modified_base 16: mod_base = OTHER; note = guanosine-3'-phosphate
  modified_base 17: mod_base = OTHER; note = uridine-3'-phosphate
  modified_base 18: mod_base = OTHER; note = guanosine-3'-phosphate
  modified_base 19: mod_base = OTHER; note = guanosine-3'-phosphate
  misc_feature 1..19: note = RNA
  misc_feature 20..21: note = DNA
atggctgtcctcttcgtggtt

SEQ ID NO: 1280 - DNA, 21 bp, synthetic construct
  source 1..21: mol_type = other DNA
  modified_base 1: mod_base = OTHER; note = uridine-3'-phosphate
  modified_base 2: mod_base = OTHER; note = cytidine-3'-phosphate
  modified_base 3: mod_base = OTHER; note = guanosine-3'-phosphate
  modified_base 4: mod_base = OTHER; note = uridine-3'-phosphate
  modified_base 5: mod_base = OTHER; note = adenosine-3'-phosphate
  modified_base 6: mod_base = OTHER; note = guanosine-3'-phosphate
  modified_base 7: mod_base = OTHER; note = uridine-3'-phosphate
  modified_base 8: mod_base = OTHER; note = cytidine-3'-phosphate
  modified_base 9: mod_base = OTHER; note = adenosine-3'-phosphate
  modified_base 10: mod_base = OTHER; note = uridine-3'-phosphate
  modified_base 11: mod_base = OTHER; note = guanosine-3'-phosphate
  modified_base 12: mod_base = OTHER; note = guanosine-3'-phosphate
  modified_base 13: mod_base = OTHER; note = cytidine-3'-phosphate
  modified_base 14: mod_base = OTHER; note = uridine-3'-phosphate
  modified_base 15: mod_base = OTHER; note = guanosine-3'-phosphate
  modified_base 16: mod_base = OTHER; note = uridine-3'-phosphate
  modified_base 17: mod_base = OTHER; note = cytidine-3'-phosphate
  modified_base 18: mod_base = OTHER; note = cytidine-3'-phosphate
  modified_base 19: mod_base = OTHER; note = uridine-3'-phosphate
  misc_feature 1..19: note = RNA
  misc_feature 20..21: note = DNA
tcgtagtcatggctgtccttt

SEQ ID NO: 1281 - DNA, 21 bp, synthetic construct
  source 1..21: mol_type = other DNA
  modified_base 1: mod_base = OTHER; note = adenosine-3'-phosphate
  modified_base 2: mod_base = OTHER; note = guanosine-3'-phosphate
  modified_base 3: mod_base = OTHER; note = cytidine-3'-phosphate
  modified_base 4: mod_base = OTHER; note = adenosine-3'-phosphate
  modified_base 5: mod_base = OTHER; note = guanosine-3'-phosphate
  modified_base 6: mod_base = OTHER; note = cytidine-3'-phosphate
  modified_base 7: mod_base = OTHER; note = guanosine-3'-phosphate
  modified_base 8: mod_base = OTHER; note = cytidine-3'-phosphate
  modified_base 9: mod_base = OTHER; note = cytidine-3'-phosphate
  modified_base 10: mod_base = OTHER; note = adenosine-3'-phosphate
  modified_base 11: mod_base = OTHER; note = cytidine-3'-phosphate
  modified_base 12: mod_base = OTHER; note = guanosine-3'-phosphate
  modified_base 13: mod_base = OTHER; note = uridine-3'-phosphate
  modified_base 14: mod_base = OTHER; note = cytidine-3'-phosphate
  modified_base 15: mod_base = OTHER; note = guanosine-3'-phosphate
  modified_base 16: mod_base = OTHER; note = uridine-3'-phosphate
  modified_base 17: mod_base = OTHER; note = adenosine-3'-phosphate
  modified_base 18: mod_base = OTHER; note = guanosine-3'-phosphate
  modified_base 19: mod_base = OTHER; note = uridine-3'-phosphate
  misc_feature 1..19: note = RNA
  misc_feature 20..21: note = DNA
agcagcgccacgtcgtagttt

SEQ ID NO: 1282 - DNA, 21 bp, synthetic construct
  source 1..21: mol_type = other DNA
  modified_base 1: mod_base = OTHER; note = uridine-3'-phosphate
  modified_base 2: mod_base = OTHER; note = cytidine-3'-phosphate
  modified_base 3: mod_base = OTHER; note = guanosine-3'-phosphate
  modified_base 4: mod_base = OTHER; note = adenosine-3'-phosphate
  modified_base 5: mod_base = OTHER; note = guanosine-3'-phosphate
  modified_base 6: mod_base = OTHER; note = cytidine-3'-phosphate
  modified_base 7: mod_base = OTHER; note = uridine-3'-phosphate
  modified_base 8: mod_base = OTHER; note = guanosine-3'-phosphate
  modified_base 9: mod_base = OTHER; note = cytidine-3'-phosphate
  modified_base 10: mod_base = OTHER; note = adenosine-3'-phosphate
  modified_base 11: mod_base = OTHER; note = guanosine-3'-phosphate
  modified_base 12: mod_base = OTHER; note = cytidine-3'-phosphate
  modified_base 13: mod_base = OTHER; note = adenosine-3'-phosphate
  modified_base 14: mod_base = OTHER; note = guanosine-3'-phosphate
  modified_base 15: mod_base = OTHER; note = cytidine-3'-phosphate
  modified_base 16: mod_base = OTHER; note = guanosine-3'-phosphate
  modified_base 17: mod_base = OTHER; note = cytidine-3'-phosphate
  modified_base 18: mod_base = OTHER; note = cytidine-3'-phosphate
  modified_base 19: mod_base = OTHER; note = adenosine-3'-phosphate
  misc_feature 1..19: note = RNA
  misc_feature 20..21: note = DNA
tcgagctgcagcagcgccatt

SEQ ID NO: 1283 - DNA, 21 bp, synthetic construct
  source 1..21: mol_type = other DNA
  modified_base 1: mod_base = OTHER; note = adenosine-3'-phosphate
  modified_base 2: mod_base = OTHER; note = cytidine-3'-phosphate
  modified_base 3: mod_base = OTHER; note = cytidine-3'-phosphate
  modified_base 4: mod_base = OTHER; note = adenosine-3'-phosphate
  modified_base 5: mod_base = OTHER; note = cytidine-3'-phosphate
  modified_base 6: mod_base = OTHER; note = cytidine-3'-phosphate
  modified_base 7: mod_base = OTHER; note = guanosine-3'-phosphate
  modified_base 8: mod_base = OTHER; note = guanosine-3'-phosphate
  modified_base 9: mod_base = OTHER; note = guanosine-3'-phosphate
  modified_base 10: mod_base = OTHER; note = uridine-3'-phosphate
  modified_base 11: mod_base = OTHER; note = guanosine-3'-phosphate
  modified_base 12: mod_base = OTHER; note = guanosine-3'-phosphate
  modified_base 13: mod_base = OTHER; note = uridine-3'-phosphate
  modified_base 14: mod_base = OTHER; note = cytidine-3'-phosphate
  modified_base 15: mod_base = OTHER; note = guanosine-3'-phosphate
  modified_base 16: mod_base = OTHER; note = adenosine-3'-phosphate
  modified_base 17: mod_base = OTHER; note = guanosine-3'-phosphate
  modified_base 18: mod_base = OTHER; note = cytidine-3'-phosphate
  modified_base 19: mod_base = OTHER; note = uridine-3'-phosphate
  misc_feature 1..19: note = RNA
  misc_feature 20..21: note = DNA
accaccgggtggtcgagcttt

SEQ ID NO: 1284 - DNA, 21 bp, synthetic construct
  source 1..21: mol_type = other DNA
  modified_base 1: mod_base = OTHER; note = cytidine-3'-phosphate
  modified_base 2: mod_base = OTHER; note = guanosine-3'-phosphate
  modified_base 3: mod_base = OTHER; note = guanosine-3'-phosphate
  modified_base 4: mod_base = OTHER; note = cytidine-3'-phosphate
  modified_base 5: mod_base = OTHER; note = cytidine-3'-phosphate
  modified_base 6: mod_base = OTHER; note = guanosine-3'-phosphate
  modified_base 7: mod_base = OTHER; note = adenosine-3'-phosphate
  modified_base 8: mod_base = OTHER; note = guanosine-3'-phosphate
  modified_base 9: mod_base = OTHER; note = cytidine-3'-phosphate
  modified_base 10: mod_base = OTHER; note = guanosine-3'-phosphate
  modified_base 11: mod_base = OTHER; note = cytidine-3'-phosphate
  modified_base 12: mod_base = OTHER; note = adenosine-3'-phosphate
  modified_base 13: mod_base = OTHER; note = cytidine-3'-phosphate
  modified_base 14: mod_base = OTHER; note = cytidine-3'-phosphate
  modified_base 15: mod_base = OTHER; note = adenosine-3'-phosphate
  modified_base 16: mod_base = OTHER; note = cytidine-3'-phosphate
  modified_base 17: mod_base = OTHER; note = cytidine-3'-phosphate
  modified_base 18: mod_base = OTHER; note = guanosine-3'-phosphate
  modified_base 19: mod_base = OTHER; note = guanosine-3'-phosphate
  misc_feature 1..19: note = RNA
  misc_feature 20..21: note = DNA
cggccgagcgcaccaccggtt

SEQ ID NO: 1285 - DNA, 21 bp, synthetic construct
  source 1..21: mol_type = other DNA
  modified_base 1: mod_base = OTHER; note = cytidine-3'-phosphate
  modified_base 2: mod_base = OTHER; note = guanosine-3'-phosphate
  modified_base 3: mod_base = OTHER; note = cytidine-3'-phosphate
  modified_base 4: mod_base = OTHER; note = adenosine-3'-phosphate
  modified_base 5: mod_base = OTHER; note = cytidine-3'-phosphate
  modified_base 6: mod_base = OTHER; note = guanosine-3'-phosphate
  modified_base 7: mod_base = OTHER; note = guanosine-3'-phosphate
  modified_base 8: mod_base = OTHER; note = cytidine-3'-phosphate
  modified_base 9: mod_base = OTHER; note = guanosine-3'-phosphate
  modified_base 10: mod_base = OTHER; note = guanosine-3'-phosphate
  modified_base 11: mod_base = OTHER; note = cytidine-3'-phosphate
  modified_base 12: mod_base = OTHER; note = cytidine-3'-phosphate
  modified_base 13: mod_base = OTHER; note = guanosine-3'-phosphate
  modified_base 14: mod_base = OTHER; note = adenosine-3'-phosphate
  modified_base 15: mod_base = OTHER; note = guanosine-3'-phosphate
  modified_base 16: mod_base = OTHER; note = cytidine-3'-phosphate
  modified_base 17: mod_base = OTHER; note = guanosine-3'-phosphate
  modified_base 18: mod_base = OTHER; note = cytidine-3'-phosphate
  modified_base 19: mod_base = OTHER; note = adenosine-3'-phosphate
  misc_feature 1..19: note = RNA
  misc_feature 20..21: note = DNA
cgcacggcggccgagcgcatt

SEQ ID NO: 1286 - DNA, 21 bp, synthetic construct
  source 1..21: mol_type = other DNA
  modified_base 1: mod_base = OTHER; note = adenosine-3'-phosphate
  modified_base 2: mod_base = OTHER; note = guanosine-3'-phosphate
  modified_base 3: mod_base = OTHER; note = guanosine-3'-phosphate
  modified_base 4: mod_base = OTHER; note = cytidine-3'-phosphate
  modified_base 5: mod_base = OTHER; note = adenosine-3'-phosphate
  modified_base 6: mod_base = OTHER; note = guanosine-3'-phosphate
  modified_base 7: mod_base = OTHER; note = adenosine-3'-phosphate
  modified_base 8: mod_base = OTHER; note = cytidine-3'-phosphate
  modified_base 9: mod_base = OTHER; note = guanosine-3'-phosphate
  modified_base 10: mod_base = OTHER; note = guanosine-3'-phosphate
  modified_base 11: mod_base = OTHER; note = guanosine-3'-phosphate
  modified_base 12: mod_base = OTHER; note = guanosine-3'-phosphate
  modified_base 13: mod_base = OTHER; note = cytidine-3'-phosphate
  modified_base 14: mod_base = OTHER; note = guanosine-3'-phosphate
  modified_base 15: mod_base = OTHER; note = cytidine-3'-phosphate
  modified_base 16: mod_base = OTHER; note = adenosine-3'-phosphate
  modified_base 17: mod_base = OTHER; note = cytidine-3'-phosphate
  modified_base 18: mod_base = OTHER; note = guanosine-3'-phosphate
  modified_base 19: mod_base = OTHER; note = guanosine-3'-phosphate
  misc_feature 1..19: note = RNA
  misc_feature 20..21: note = DNA
aggcagacggggcgcacggtt

SEQ ID NO: 1287 - DNA, 21 bp, synthetic construct
  source 1..21: mol_type = other DNA
  modified_base 1: mod_base = OTHER; note = cytidine-3'-phosphate
  modified_base 2: mod_base = OTHER; note = guanosine-3'-phosphate
  modified_base 3: mod_base = OTHER; note = cytidine-3'-phosphate
  modified_base 4: mod_base = OTHER; note = guanosine-3'-phosphate
  modified_base 5: mod_base = OTHER; note = cytidine-3'-phosphate
  modified_base 6: mod_base = OTHER; note = guanosine-3'-phosphate
  modified_base 7: mod_base = OTHER; note = guanosine-3'-phosphate
  modified_base 8: mod_base = OTHER; note = guanosine-3'-phosphate
  modified_base 9: mod_base = OTHER; note = cytidine-3'-phosphate
  modified_base 10: mod_base = OTHER; note = adenosine-3'-phosphate
  modified_base 11: mod_base = OTHER; note = guanosine-3'-phosphate
  modified_base 12: mod_base = OTHER; note = guanosine-3'-phosphate
  modified_base 13: mod_base = OTHER; note = cytidine-3'-phosphate
  modified_base 14: mod_base = OTHER; note = adenosine-3'-phosphate
  modified_base 15: mod_base = OTHER; note = guanosine-3'-phosphate
  modified_base 16: mod_base = OTHER; note = adenosine-3'-phosphate
  modified_base 17: mod_base = OTHER; note = cytidine-3'-phosphate
  modified_base 18: mod_base = OTHER; note = guanosine-3'-phosphate
  modified_base 19: mod_base = OTHER; note = guanosine-3'-phosphate
  misc_feature 1..19: note = RNA
  misc_feature 20..21: note = DNA
cgcgcgggcaggcagacggtt

SEQ ID NO: 1288 - DNA, 21 bp, synthetic construct
  source 1..21: mol_type = other DNA
  modified_base 1: mod_base = OTHER; note = adenosine-3'-phosphate
  modified_base 2: mod_base = OTHER; note = adenosine-3'-phosphate
  modified_base 3: mod_base = OTHER; note = guanosine-3'-phosphate
  modified_base 4: mod_base = OTHER; note = adenosine-3'-phosphate
  modified_base 5: mod_base = OTHER; note = adenosine-3'-phosphate
  modified_base 6: mod_base = OTHER; note = guanosine-3'-phosphate
  modified_base 7: mod_base = OTHER; note = uridine-3'-phosphate
  modified_base 8: mod_base = OTHER; note = guanosine-3'-phosphate
  modified_base 9: mod_base = OTHER; note = guanosine-3'-phosphate
  modified_base 10: mod_base = OTHER; note = guanosine-3'-phosphate
  modified_base 11: mod_base = OTHER; note = adenosine-3'-phosphate
  modified_base 12: mod_base = OTHER; note = guanosine-3'-phosphate
  modified_base 13: mod_base = OTHER; note = cytidine-3'-phosphate
  modified_base 14: mod_base = OTHER; note = guanosine-3'-phosphate
  modified_base 15: mod_base = OTHER; note = cytidine-3'-phosphate
  modified_base 16: mod_base = OTHER; note = guanosine-3'-phosphate
  modified_base 17: mod_base = OTHER; note = cytidine-3'-phosphate
  modified_base 18: mod_base = OTHER; note = guanosine-3'-phosphate
  modified_base 19: mod_base = OTHER; note = guanosine-3'-phosphate
  misc_feature 1..19: note = RNA
  misc_feature 20..21: note = DNA
aagaagtgggagcgcgcggtt

SEQ ID NO: 1289 - DNA, 21 bp, synthetic construct
  source 1..21: mol_type = other DNA
  modified_base 1: mod_base = OTHER; note = cytidine-3'-phosphate
  modified_base 2: mod_base = OTHER; note = cytidine-3'-phosphate
  modified_base 3: mod_base = OTHER; note = guanosine-3'-phosphate
  modified_base 4: mod_base = OTHER; note = guanosine-3'-phosphate
  modified_base 5: mod_base = OTHER; note = guanosine-3'-phosphate
  modified_base 6: mod_base = OTHER; note = cytidine-3'-phosphate
  modified_base 7: mod_base = OTHER; note = uridine-3'-phosphate
  modified_base 8: mod_base = OTHER; note = cytidine-3'-phosphate
  modified_base 9: mod_base = OTHER; note = guanosine-3'-phosphate
  modified_base 10: mod_base = OTHER; note = adenosine-3'-phosphate
  modified_base 11: mod_base = OTHER; note = adenosine-3'-phosphate
  modified_base 12: mod_base = OTHER; note = guanosine-3'-phosphate
  modified_base 13: mod_base = OTHER; note = adenosine-3'-phosphate
  modified_base 14: mod_base = OTHER; note = adenosine-3'-phosphate
  modified_base 15: mod_base = OTHER; note = guanosine-3'-phosphate
  modified_base 16: mod_base = OTHER; note = uridine-3'-phosphate
  modified_base 17: mod_base = OTHER; note = guanosine-3'-phosphate
  modified_base 18: mod_base = OTHER; note = guanosine-3'-phosphate
  modified_base 19: mod_base = OTHER; note = guanosine-3'-phosphate
  misc_feature 1..19: note = RNA
  misc_feature 20..21: note = DNA
ccgggctcgaagaagtgggtt

SEQ ID NO: 1290 - DNA, 21 bp, synthetic construct
  source 1..21: mol_type = other DNA
  modified_base 1: mod_base = OTHER; note = adenosine-3'-phosphate
  modified_base 2: mod_base = OTHER; note = guanosine-3'-phosphate
  modified_base 3: mod_base = OTHER; note = cytidine-3'-phosphate
  modified_base 4: mod_base = OTHER; note = adenosine-3'-phosphate
  modified_base 5: mod_base = OTHER; note = guanosine-3'-phosphate
  modified_base 6: mod_base = OTHER; note = uridine-3'-phosphate
  modified_base 7: mod_base = OTHER; note = guanosine-3'-phosphate
  modified_base 8: mod_base = OTHER; note = cytidine-3'-phosphate
  modified_base 9: mod_base = OTHER; note = adenosine-3'-phosphate
  modified_base 10: mod_base = OTHER; note = guanosine-3'-phosphate
  modified_base 11: mod_base = OTHER; note = guanosine-3'-phosphate
  modified_base 12: mod_base = OTHER; note = cytidine-3'-phosphate
  modified_base 13: mod_base = OTHER; note = cytidine-3'-phosphate
  modified_base 14: mod_base = OTHER; note = guanosine-3'-phosphate
  modified_base 15: mod_base = OTHER; note = guanosine-3'-phosphate
  modified_base 16: mod_base = OTHER; note = guanosine-3'-phosphate
  modified_base 17: mod_base = OTHER; note = cytidine-3'-phosphate
  modified_base 18: mod_base = OTHER; note = uridine-3'-phosphate
  modified_base 19: mod_base = OTHER; note = cytidine-3'-phosphate
  misc_feature 1..19: note = RNA
  misc_feature 20..21: note = DNA
agcagtgcaggccgggctctt

SEQ ID NO: 1291 - DNA, 21 bp, synthetic construct
  source 1..21: mol_type = other DNA
  modified_base 1: mod_base = OTHER; note = uridine-3'-phosphate
  modified_base 2: mod_base = OTHER; note = adenosine-3'-phosphate
  modified_base 3: mod_base = OTHER; note = adenosine-3'-phosphate
  modified_base 4: mod_base = OTHER; note = uridine-3'-phosphate
  modified_base 5: mod_base = OTHER; note = cytidine-3'-phosphate
  modified_base 6: mod_base = OTHER; note = cytidine-3'-phosphate
  modified_base 7: mod_base = OTHER; note = adenosine-3'-phosphate
  modified_base 8: mod_base = OTHER; note = guanosine-3'-phosphate
  modified_base 9: mod_base = OTHER; note = cytidine-3'-phosphate
  modified_base 10: mod_base = OTHER; note = adenosine-3'-phosphate
  modified_base 11: mod_base = OTHER; note = guanosine-3'-phosphate
  modified_base 12: mod_base = OTHER; note = uridine-3'-phosphate
  modified_base 13: mod_base = OTHER; note = guanosine-3'-phosphate
  modified_base 14: mod_base = OTHER; note = cytidine-3'-phosphate
  modified_base 15: mod_base = OTHER; note = adenosine-3'-phosphate
  modified_base 16: mod_base = OTHER; note = guanosine-3'-phosphate
  modified_base 17: mod_base = OTHER; note = guanosine-3'-phosphate
  modified_base 18: mod_base = OTHER; note = cytidine-3'-phosphate
  modified_base 19: mod_base = OTHER; note = cytidine-3'-phosphate
  misc_feature 1..19: note = RNA
  misc_feature 20..21: note = DNA
taatccagcagtgcaggcctt

SEQ ID NO: 1292 - DNA, 21 bp, synthetic construct
  source 1..21: mol_type = other DNA
  modified_base 1: mod_base = OTHER; note = cytidine-3'-phosphate
  modified_base 2: mod_base = OTHER; note = guanosine-3'-phosphate
  modified_base 3: mod_base = OTHER; note = cytidine-3'-phosphate
  modified_base 4: mod_base = OTHER; note = cytidine-3'-phosphate
  modified_base 5: mod_base = OTHER; note = cytidine-3'-phosphate
  modified_base 6: mod_base = OTHER; note = cytidine-3'-phosphate
  modified_base 7: mod_base = OTHER; note = adenosine-3'-phosphate
  modified_base 8: mod_base = OTHER; note = guanosine-3'-phosphate
  modified_base 9: mod_base = OTHER; note = cytidine-3'-phosphate
  modified_base 10: mod_base = OTHER; note = cytidine-3'-phosphate
  modified_base 11: mod_base = OTHER; note = cytidine-3'-phosphate
  modified_base 12: mod_base = OTHER; note = guanosine-3'-phosphate
  modified_base 13: mod_base = OTHER; note = uridine-3'-phosphate
  modified_base 14: mod_base = OTHER; note = adenosine-3'-phosphate
  modified_base 15: mod_base = OTHER; note = adenosine-3'-phosphate
  modified_base 16: mod_base = OTHER; note = uridine-3'-phosphate
  modified_base 17: mod_base = OTHER; note = cytidine-3'-phosphate
  modified_base 18: mod_base = OTHER; note = cytidine-3'-phosphate
  modified_base 19: mod_base = OTHER; note = adenosine-3'-phosphate
  misc_feature 1..19: note = RNA
  misc_feature 20..21: note = DNA
cgccccagcccgtaatccatt

SEQ ID NO: 1293 - DNA, 21 bp, synthetic construct
  source 1..21: mol_type = other DNA
  modified_base 1: mod_base = OTHER; note = uridine-3'-phosphate
  modified_base 2: mod_base = OTHER; note = cytidine-3'-phosphate
  modified_base 3: mod_base = OTHER; note = guanosine-3'-phosphate
  modified_base 4: mod_base = OTHER; note = cytidine-3'-phosphate
  modified_base 5: mod_base = OTHER; note = guanosine-3'-phosphate
  modified_base 6: mod_base = OTHER; note = cytidine-3'-phosphate
  modified_base 7: mod_base = OTHER; note = adenosine-3'-phosphate
  modified_base 8: mod_base = OTHER; note = adenosine-3'-phosphate
  modified_base 9: mod_base = OTHER; note = guanosine-3'-phosphate
  modified_base 10: mod_base = OTHER; note = guanosine-3'-phosphate
  modified_base 11: mod_base = OTHER; note = cytidine-3'-phosphate
  modified_base 12: mod_base = OTHER; note = guanosine-3'-phosphate
  modified_base 13: mod_base = OTHER; note = cytidine-3'-phosphate
  modified_base 14: mod_base = OTHER; note = cytidine-3'-phosphate
  modified_base 15: mod_base = OTHER; note = cytidine-3'-phosphate
  modified_base 16: mod_base = OTHER; note = cytidine-3'-phosphate
  modified_base 17: mod_base = OTHER; note = adenosine-3'-phosphate
  modified_base 18: mod_base = OTHER; note = guanosine-3'-phosphate
  modified_base 19: mod_base = OTHER; note = cytidine-3'-phosphate
  misc_feature 1..19: note = RNA
  misc_feature 20..21: note = DNA
tcgcgcaaggcgccccagctt

SEQ ID NO: 1294 - DNA, 21 bp, synthetic construct
  source 1..21: mol_type = other DNA
  modified_base 1: mod_base = OTHER; note = adenosine-3'-phosphate
  modified_base 2: mod_base = OTHER; note = uridine-3'-phosphate
  modified_base 3: mod_base = OTHER; note = guanosine-3'-phosphate
  modified_base 4: mod_base = OTHER; note = guanosine-3'-phosphate
  modified_base 5: mod_base = OTHER; note = guanosine-3'-phosphate
  modified_base 6: mod_base = OTHER; note = guanosine-3'-phosphate
  modified_base 7: mod_base = OTHER; note = cytidine-3'-phosphate
  modified_base 8: mod_base = OTHER; note = cytidine-3'-phosphate
  modified_base 9: mod_base = OTHER; note = guanosine-3'-phosphate
  modified_base 10: mod_base = OTHER; note = cytidine-3'-phosphate
  modified_base 11: mod_base = OTHER; note = cytidine-3'-phosphate
  modified_base 12: mod_base = OTHER; note = cytidine-3'-phosphate
  modified_base 13: mod_base = OTHER; note = uridine-3'-phosphate
  modified_base 14: mod_base = OTHER; note = cytidine-3'-phosphate
  modified_base 15: mod_base = OTHER; note = guanosine-3'-phosphate
  modified_base 16: mod_base = OTHER; note = cytidine-3'-phosphate
  modified_base 17: mod_base = OTHER; note = guanosine-3'-phosphate
  modified_base 18: mod_base = OTHER; note = cytidine-3'-phosphate
  modified_base 19: mod_base = OTHER; note = adenosine-3'-phosphate
  misc_feature 1..19: note = RNA
  misc_feature 20..21: note = DNA
atggggccgccctcgcgcatt

SEQ ID NO: 1295 - DNA, 21 bp, synthetic construct
  source 1..21: mol_type = other DNA
  modified_base 1: mod_base = OTHER; note = uridine-3'-phosphate
  modified_base 2: mod_base = OTHER; note = uridine-3'-phosphate
  modified_base 3: mod_base = OTHER; note = guanosine-3'-phosphate
  modified_base 4: mod_base = OTHER; note = cytidine-3'-phosphate
  modified_base 5: mod_base = OTHER; note = uridine-3'-phosphate
  modified_base 6: mod_base = OTHER; note = guanosine-3'-phosphate
  modified_base 7: mod_base = OTHER; note = adenosine-3'-phosphate
  modified_base 8: mod_base = OTHER; note = uridine-3'-phosphate
  modified_base 9: mod_base = OTHER; note = guanosine-3'-phosphate
  modified_base 10: mod_base = OTHER; note = guanosine-3'-phosphate
  modified_base 11: mod_base = OTHER; note = guanosine-3'-phosphate
  modified_base 12: mod_base = OTHER; note = guanosine-3'-phosphate
  modified_base 13: mod_base = OTHER; note = cytidine-3'-phosphate
  modified_base 14: mod_base = OTHER; note = cytidine-3'-phosphate
  modified_base 15: mod_base = OTHER; note = guanosine-3'-phosphate
  modified_base 16: mod_base = OTHER; note = cytidine-3'-phosphate
  modified_base 17: mod_base = OTHER; note = cytidine-3'-phosphate
  modified_base 18: mod_base = OTHER; note = cytidine-3'-phosphate
  modified_base 19: mod_base = OTHER; note = uridine-3'-phosphate
  misc_feature 1..19: note = RNA
  misc_feature 20..21: note = DNA
ttgctgatggggccgcccttt

SEQ ID NO: 1296 - DNA, 21 bp, synthetic construct
  source 1..21: mol_type = other DNA
  modified_base 1: mod_base = OTHER; note = uridine-3'-phosphate
  modified_base 2: mod_base = OTHER; note = uridine-3'-phosphate
  modified_base 3: mod_base = OTHER; note = cytidine-3'-phosphate
  modified_base 4: mod_base = OTHER; note = uridine-3'-phosphate
  modified_base 5: mod_base = OTHER; note = guanosine-3'-phosphate
  modified_base 6: mod_base = OTHER; note = cytidine-3'-phosphate
  modified_base 7: mod_base = OTHER; note = adenosine-3'-phosphate
  modified_base 8: mod_base = OTHER; note = guanosine-3'-phosphate
  modified_base 9: mod_base = OTHER; note = adenosine-3'-phosphate
  modified_base 10: mod_base = OTHER; note = guanosine-3'-phosphate
  modified_base 11: mod_base = OTHER; note = cytidine-3'-phosphate
  modified_base 12: mod_base = OTHER; note = guanosine-3'-phosphate
  modified_base 13: mod_base = OTHER; note = uridine-3'-phosphate
  modified_base 14: mod_base = OTHER; note = uridine-3'-phosphate
  modified_base 15: mod_base = OTHER; note = guanosine-3'-phosphate
  modified_base 16: mod_base = OTHER; note = cytidine-3'-phosphate
  modified_base 17: mod_base = OTHER; note = uridine-3'-phosphate
  modified_base 18: mod_base = OTHER; note = guanosine-3'-phosphate
  modified_base 19: mod_base = OTHER; note = adenosine-3'-phosphate
  misc_feature 1..19: note = RNA
  misc_feature 20..21: note = DNA
ttctgcagagcgttgctgatt

SEQ ID NO: 1297 - DNA, 21 bp, synthetic construct
  source 1..21: mol_type = other DNA
  modified_base 1: mod_base = OTHER; note = uridine-3'-phosphate
  modified_base 2: mod_base = OTHER; note = guanosine-3'-phosphate
  modified_base 3: mod_base = OTHER; note = cytidine-3'-phosphate
  modified_base 4: mod_base = OTHER; note = adenosine-3'-phosphate
  modified_base 5: mod_base = OTHER; note = cytidine-3'-phosphate
  modified_base 6: mod_base = OTHER; note = adenosine-3'-phosphate
  modified_base 7: mod_base = OTHER; note = uridine-3'-phosphate
  modified_base 8: mod_base = OTHER; note = cytidine-3'-phosphate
  modified_base 9: mod_base = OTHER; note = cytidine-3'-phosphate
  modified_base 10: mod_base = OTHER; note = adenosine-3'-phosphate
  modified_base 11: mod_base = OTHER; note = cytidine-3'-phosphate
  modified_base 12: mod_base = OTHER; note = uridine-3'-phosphate
  modified_base 13: mod_base = OTHER; note = uridine-3'-phosphate
  modified_base 14: mod_base = OTHER; note = uridine-3'-phosphate
  modified_base 15: mod_base = OTHER; note = cytidine-3'-phosphate
  modified_base 16: mod_base = OTHER; note = uridine-3'-phosphate
  modified_base 17: mod_base = OTHER; note = guanosine-3'-phosphate
  modified_base 18: mod_base = OTHER; note = cytidine-3'-phosphate
  modified_base 19: mod_base = OTHER; note = adenosine-3'-phosphate
  misc_feature 1..19: note = RNA
  misc_feature 20..21: note = DNA
tgcacatccactttctgcatt

SEQ ID NO: 1298 - DNA, 21 bp, synthetic construct
  source 1..21: mol_type = other DNA
  modified_base 1: mod_base = OTHER; note = adenosine-3'-phosphate
  modified_base 2: mod_base = OTHER; note = uridine-3'-phosphate
  modified_base 3: mod_base = OTHER; note = cytidine-3'-phosphate
  modified_base 4: mod_base = OTHER; note = adenosine-3'-phosphate
  modified_base 5: mod_base = OTHER; note = adenosine-3'-phosphate
  modified_base 6: mod_base = OTHER; note = cytidine-3'-phosphate
  modified_base 7: mod_base = OTHER; note = uridine-3'-phosphate
  modified_base 8: mod_base = OTHER; note = guanosine-3'-phosphate
  modified_base 9: mod_base = OTHER; note = cytidine-3'-phosphate
  modified_base 10: mod_base = OTHER; note = adenosine-3'-phosphate
  modified_base 11: mod_base = OTHER; note = cytidine-3'-phosphate
  modified_base 12: mod_base = OTHER; note = adenosine-3'-phosphate
  modified_base 13: mod_base = OTHER; note = uridine-3'-phosphate
  modified_base 14: mod_base = OTHER; note = cytidine-3'-phosphate
  modified_base 15: mod_base = OTHER; note = cytidine-3'-phosphate
  modified_base 16: mod_base = OTHER; note = adenosine-3'-phosphate
  modified_base 17: mod_base = OTHER; note = cytidine-3'-phosphate
  modified_base 18: mod_base = OTHER; note = uridine-3'-phosphate
  modified_base 19: mod_base = OTHER; note = uridine-3'-phosphate
  misc_feature 1..19: note = RNA
  misc_feature 20..21: note = DNA
atcaactgcacatccactttt

SEQ ID NO: 1299 - DNA, 21 bp, synthetic construct
  source 1..21: mol_type = other DNA
  modified_base 1: mod_base = OTHER; note = guanosine-3'-phosphate
  modified_base 2: mod_base = OTHER; note = uridine-3'-phosphate
  modified_base 3: mod_base = OTHER; note = cytidine-3'-phosphate
  modified_base 4: mod_base = OTHER; note = cytidine-3'-phosphate
  modified_base 5: mod_base = OTHER; note = uridine-3'-phosphate
  modified_base 6: mod_base = OTHER; note = guanosine-3'-phosphate
  modified_base 7: mod_base = OTHER; note = uridine-3'-phosphate
  modified_base 8: mod_base = OTHER; note = guanosine-3'-phosphate
  modified_base 9: mod_base = OTHER; note = guanosine-3'-phosphate
  modified_base 10: mod_base = OTHER; note = guanosine-3'-phosphate
  modified_base 11: mod_base = OTHER; note = adenosine-3'-phosphate
  modified_base 12: mod_base = OTHER; note = uridine-3'-phosphate
  modified_base 13: mod_base = OTHER; note = cytidine-3'-phosphate
  modified_base 14: mod_base = OTHER; note = adenosine-3'-phosphate
  modified_base 15: mod_base = OTHER; note = adenosine-3'-phosphate
  modified_base 16: mod_base = OTHER; note = cytidine-3'-phosphate
  modified_base 17: mod_base = OTHER; note = uridine-3'-phosphate
  modified_base 18: mod_base = OTHER; note = guanosine-3'-phosphate
  modified_base 19: mod_base = OTHER; note = cytidine-3'-phosphate
  misc_feature 1..19: note = RNA
  misc_feature 20..21: note = DNA
gtcctgtgggatcaactgctt

SEQ ID NO: 1300 - DNA, 21 bp, synthetic construct
  source 1..21: mol_type = other DNA
  modified_base 1: mod_base = OTHER; note = uridine-3'-phosphate
  modified_base 2: mod_base = OTHER; note = cytidine-3'-phosphate
  modified_base 3: mod_base = OTHER; note = guanosine-3'-phosphate
  modified_base 4: mod_base = OTHER; note = cytidine-3'-phosphate
  modified_base 5: mod_base = OTHER; note = uridine-3'-phosphate
  modified_base 6: mod_base = OTHER; note = guanosine-3'-phosphate
  modified_base 7: mod_base = OTHER; note = cytidine-3'-phosphate
  modified_base 8: mod_base = OTHER; note = adenosine-3'-phosphate
  modified_base 9: mod_base = OTHER; note = cytidine-3'-phosphate
  modified_base 10: mod_base = OTHER; note = adenosine-3'-phosphate
  modified_base 11: mod_base = OTHER; note = guanosine-3'-phosphate
  modified_base 12: mod_base = OTHER; note = guanosine-3'-phosphate
  modified_base 13: mod_base = OTHER; note = uridine-3'-phosphate
  modified_base 14: mod_base = OTHER; note = cytidine-3'-phosphate
  modified_base 15: mod_base = OTHER; note = cytidine-3'-phosphate
  modified_base 16: mod_base = OTHER; note = uridine-3'-phosphate
  modified_base 17: mod_base = OTHER; note = guanosine-3'-phosphate
  modified_base 18: mod_base = OTHER; note = uridine-3'-phosphate
  modified_base 19: mod_base = OTHER; note = guanosine-3'-phosphate
  misc_feature 1..19: note = RNA
  misc_feature 20..21: note = DNA
tcgctgcacaggtcctgtgtt

SEQ ID NO: 1301 - DNA, 21 bp, synthetic construct
  source 1..21: mol_type = other DNA
  modified_base 1: mod_base = OTHER; note = uridine-3'-phosphate
  modified_base 2: mod_base = OTHER; note = adenosine-3'-phosphate
  modified_base 3: mod_base = OTHER; note = guanosine-3'-phosphate
  modified_base 4: mod_base = OTHER; note = cytidine-3'-phosphate
  modified_base 5: mod_base = OTHER; note = guanosine-3'-phosphate
  modified_base 6: mod_base = OTHER; note = adenosine-3'-phosphate
  modified_base 7: mod_base = OTHER; note = uridine-3'-phosphate
  modified_base 8: mod_base = OTHER; note = adenosine-3'-phosphate
  modified_base 9: mod_base = OTHER; note = guanosine-3'-phosphate
  modified_base 10: mod_base = OTHER; note = adenosine-3'-phosphate
  modified_base 11: mod_base = OTHER; note = cytidine-3'-phosphate
  modified_base 12: mod_base = OTHER; note = cytidine-3'-phosphate
  modified_base 13: mod_base = OTHER; note = uridine-3'-phosphate
  modified_base 14: mod_base = OTHER; note = cytidine-3'-phosphate
  modified_base 15: mod_base = OTHER; note = guanosine-3'-phosphate
  modified_base 16: mod_base = OTHER; note = cytidine-3'-phosphate
  modified_base 17: mod_base = OTHER; note = uridine-3'-phosphate
  modified_base 18: mod_base = OTHER; note = guanosine-3'-phosphate
  modified_base 19: mod_base = OTHER; note = cytidine-3'-phosphate
  misc_feature 1..19: note = RNA
  misc_feature 20..21: note = DNA
tagcgatagacctcgctgctt

SEQ ID NO: 1302 - DNA, 21 bp, synthetic construct
  source 1..21: mol_type = other DNA
  modified_base 1: mod_base = OTHER; note = uridine-3'-phosphate
  modified_base 2: mod_base = OTHER; note = cytidine-3'-phosphate
  modified_base 3: mod_base = OTHER; note = adenosine-3'-phosphate
  modified_base 4: mod_base = OTHER; note = cytidine-3'-phosphate
  modified_base 5: mod_base = OTHER; note = cytidine-3'-phosphate
  modified_base 6: mod_base = OTHER; note = uridine-3'-phosphate
  modified_base 7: mod_base = OTHER; note = guanosine-3'-phosphate
  modified_base 8: mod_base = OTHER; note = guanosine-3'-phosphate
  modified_base 9: mod_base = OTHER; note = uridine-3'-phosphate
  modified_base 10: mod_base = OTHER; note = adenosine-3'-phosphate
  modified_base 11: mod_base = OTHER; note = guanosine-3'-phosphate
  modified_base 12: mod_base = OTHER; note = cytidine-3'-phosphate
  modified_base 13: mod_base = OTHER; note = guanosine-3'-phosphate
  modified_base 14: mod_base = OTHER; note = adenosine-3'-phosphate
  modified_base 15: mod_base = OTHER; note = uridine-3'-phosphate
  modified_base 16: mod_base = OTHER; note = adenosine-3'-phosphate
  modified_base 17: mod_base = OTHER; note = guanosine-3'-phosphate
  modified_base 18: mod_base = OTHER; note = adenosine-3'-phosphate
  modified_base 19: mod_base = OTHER; note = cytidine-3'-phosphate
  misc_feature 1..19: note = RNA
  misc_feature 20..21: note = DNA
tcacctggtagcgatagactt

SEQ ID NO: 1303 - DNA, 21 bp, synthetic construct
  source 1..21: mol_type = other DNA
  modified_base 1: mod_base = OTHER; note = cytidine-3'-phosphate
  modified_base 2: mod_base = OTHER; note = adenosine-3'-phosphate
  modified_base 3: mod_base = OTHER; note = uridine-3'-phosphate
  modified_base 4: mod_base = OTHER; note = guanosine-3'-phosphate
  modified_base 5: mod_base = OTHER; note = cytidine-3'-phosphate
  modified_base 6: mod_base = OTHER; note = guanosine-3'-phosphate
  modified_base 7: mod_base = OTHER; note = uridine-3'-phosphate
  modified_base 8: mod_base = OTHER; note = guanosine-3'-phosphate
  modified_base 9: mod_base = OTHER; note = guanosine-3'-phosphate
  modified_base 10: mod_base = OTHER; note = cytidine-3'-phosphate
  modified_base 11: mod_base = OTHER; note = guanosine-3'-phosphate
  modified_base 12: mod_base = OTHER; note = uridine-3'-phosphate
  modified_base 13: mod_base = OTHER; note = cytidine-3'-phosphate
  modified_base 14: mod_base = OTHER; note = adenosine-3'-phosphate
  modified_base 15: mod_base = OTHER; note = cytidine-3'-phosphate
  modified_base 16: mod_base = OTHER; note = cytidine-3'-phosphate
  modified_base 17: mod_base = OTHER; note = uridine-3'-phosphate
  modified_base 18: mod_base = OTHER; note = guanosine-3'-phosphate
  modified_base 19: mod_base = OTHER; note = guanosine-3'-phosphate
  misc_feature 1..19: note = RNA
  misc_feature 20..21: note = DNA
catgcgtggcgtcacctggtt

SEQ ID NO: 1304 - DNA, 21 bp, synthetic construct
  source 1..21: mol_type = other DNA
  modified_base 1: mod_base = OTHER; note = cytidine-3'-phosphate
  modified_base 2: mod_base = OTHER; note = guanosine-3'-phosphate
  modified_base 3: mod_base = OTHER; note = guanosine-3'-phosphate
  modified_base 4: mod_base = OTHER; note = cytidine-3'-phosphate
  modified_base 5: mod_base = OTHER; note = adenosine-3'-phosphate
  modified_base 6: mod_base = OTHER; note = cytidine-3'-phosphate
  modified_base 7: mod_base = OTHER; note = adenosine-3'-phosphate
  modified_base 8: mod_base = OTHER; note = cytidine-3'-phosphate
  modified_base 9: mod_base = OTHER; note = adenosine-3'-phosphate
  modified_base 10: mod_base = OTHER; note = guanosine-3'-phosphate
  modified_base 11: mod_base = OTHER; note = cytidine-3'-phosphate
  modified_base 12: mod_base = OTHER; note = adenosine-3'-phosphate
  modified_base 13: mod_base = OTHER; note = uridine-3'-phosphate
  modified_base 14: mod_base = OTHER; note = guanosine-3'-phosphate
  modified_base 15: mod_base = OTHER; note = cytidine-3'-phosphate
  modified_base 16: mod_base = OTHER; note = guanosine-3'-phosphate
  modified_base 17: mod_base = OTHER; note = uridine-3'-phosphate
  modified_base 18: mod_base = OTHER; note = guanosine-3'-phosphate
  modified_base 19: mod_base = OTHER; note = guanosine-3'-phosphate
  misc_feature 1..19: note = RNA
  misc_feature 20..21: note = DNA
cggcacacagcatgcgtggtt

SEQ ID NO: 1305 - DNA, 21 bp, synthetic construct
  source 1..21: mol_type = other DNA
  modified_base 1: mod_base = OTHER; note = uridine-3'-phosphate
  modified_base 2: mod_base = OTHER; note = guanosine-3'-phosphate
  modified_base 3: mod_base = OTHER; note = cytidine-3'-phosphate
  modified_base 4: mod_base = OTHER; note = guanosine-3'-phosphate
  modified_base 5: mod_base = OTHER; note = guanosine-3'-phosphate
  modified_base 6: mod_base = OTHER; note = uridine-3'-phosphate
  modified_base 7: mod_base = OTHER; note = adenosine-3'-phosphate
  modified_base 8: mod_base = OTHER; note = guanosine-3'-phosphate
  modified_base 9: mod_base = OTHER; note = cytidine-3'-phosphate
  modified_base 10: mod_base = OTHER; note = cytidine-3'-phosphate
  modified_base 11: mod_base = OTHER; note = guanosine-3'-phosphate
  modified_base 12: mod_base = OTHER; note = guanosine-3'-phosphate
  modified_base 13: mod_base = OTHER; note = cytidine-3'-phosphate
  modified_base 14: mod_base = OTHER; note = adenosine-3'-phosphate
  modified_base 15: mod_base = OTHER; note = cytidine-3'-phosphate
  modified_base 16: mod_base = OTHER; note = adenosine-3'-phosphate
  modified_base 17: mod_base = OTHER; note = cytidine-3'-phosphate
  modified_base 18: mod_base = OTHER; note = adenosine-3'-phosphate
  modified_base 19: mod_base = OTHER; note = guanosine-3'-phosphate
  misc_feature 1..19: note = RNA
  misc_feature 20..21: note = DNA
tgcggtagccggcacacagtt

SEQ ID NO: 1306 - DNA, 21 bp, synthetic construct
  source 1..21: mol_type = other DNA
  modified_base 1: mod_base = OTHER; note = uridine-3'-phosphate
  modified_base 2: mod_base = OTHER; note = cytidine-3'-phosphate
  modified_base 3: mod_base = OTHER; note = cytidine-3'-phosphate
  modified_base 4: mod_base = OTHER; note = uridine-3'-phosphate
  modified_base 5: mod_base = OTHER; note = uridine-3'-phosphate
  modified_base 6: mod_base = OTHER; note = cytidine-3'-phosphate
  modified_base 7: mod_base = OTHER; note = uridine-3'-phosphate
  modified_base 8: mod_base = OTHER; note = uridine-3'-phosphate
  modified_base 9: mod_base = OTHER; note = guanosine-3'-phosphate
  modified_base 10: mod_base = OTHER; note = cytidine-3'-phosphate
  modified_base 11: mod_base = OTHER; note = cytidine-3'-phosphate
  modified_base 12: mod_base = OTHER; note = cytidine-3'-phosphate
  modified_base 13: mod_base = OTHER; note = uridine-3'-phosphate
  modified_base 14: mod_base = OTHER; note = uridine-3'-phosphate
  modified_base 15: mod_base = OTHER; note = guanosine-3'-phosphate
  modified_base 16: mod_base = OTHER; note = cytidine-3'-phosphate
  modified_base 17: mod_base = OTHER; note = guanosine-3'-phosphate
  modified_base 18: mod_base = OTHER; note = guanosine-3'-phosphate
  modified_base 19: mod_base = OTHER; note = uridine-3'-phosphate
  misc_feature 1..19: note = RNA
  misc_feature 20..21: note = DNA
tccttcttgcccttgcggttt

SEQ ID NO: 1307 - DNA, 21 bp, synthetic construct
  source 1..21: mol_type = other DNA
  modified_base 1: mod_base = OTHER; note = uridine-3'-phosphate
  modified_base 2: mod_base = OTHER; note = guanosine-3'-phosphate
  modified_base 3: mod_base = OTHER; note = adenosine-3'-phosphate
  modified_base 4: mod_base = OTHER; note = cytidine-3'-phosphate
  modified_base 5: mod_base = OTHER; note = adenosine-3'-phosphate
  modified_base 6: mod_base = OTHER; note = guanosine-3'-phosphate
  modified_base 7: mod_base = OTHER; note = guanosine-3'-phosphate
  modified_base 8: mod_base = OTHER; note = cytidine-3'-phosphate
  modified_base 9: mod_base = OTHER; note = adenosine-3'-phosphate
  modified_base 10: mod_base = OTHER; note = uridine-3'-phosphate
  modified_base 11: mod_base = OTHER; note = cytidine-3'-phosphate
  modified_base 12: mod_base = OTHER; note = cytidine-3'-phosphate
  modified_base 13: mod_base = OTHER; note = uridine-3'-phosphate
  modified_base 14: mod_base = OTHER; note = uridine-3'-phosphate
  modified_base 15: mod_base = OTHER; note = cytidine-3'-phosphate
  modified_base 16: mod_base = OTHER; note = uridine-3'-phosphate
  modified_base 17: mod_base = OTHER; note = uridine-3'-phosphate
  modified_base 18: mod_base = OTHER; note = guanosine-3'-phosphate
  modified_base 19: mod_base = OTHER; note = cytidine-3'-phosphate
  misc_feature 1..19: note = RNA
  misc_feature 20..21: note = DNA
tgacaggcatccttcttgctt

SEQ ID NO: 1308 - DNA, 21 bp, synthetic construct
  source 1..21: mol_type = other DNA
  modified_base 1: mod_base = OTHER; note = cytidine-3'-phosphate
  modified_base 2: mod_base = OTHER; note = uridine-3'-phosphate
  modified_base 3: mod_base = OTHER; note = guanosine-3'-phosphate
  modified_base 4: mod_base = OTHER; note = adenosine-3'-phosphate
  modified_base 5: mod_base = OTHER; note = guanosine-3'-phosphate
  modified_base 6: mod_base = OTHER; note = uridine-3'-phosphate
  modified_base 7: mod_base = OTHER; note = cytidine-3'-phosphate
  modified_base 8: mod_base = OTHER; note = adenosine-3'-phosphate
  modified_base 9: mod_base = OTHER; note = cytidine-3'-phosphate
  modified_base 10: mod_base = OTHER; note = cytidine-3'-phosphate
  modified_base 11: mod_base = OTHER; note = cytidine-3'-phosphate
  modified_base 12: mod_base = OTHER; note = uridine-3'-phosphate
  modified_base 13: mod_base = OTHER; note = guanosine-3'-phosphate
  modified_base 14: mod_base = OTHER; note = adenosine-3'-phosphate
  modified_base 15: mod_base = OTHER; note = cytidine-3'-phosphate
  modified_base 16: mod_base = OTHER; note = adenosine-3'-phosphate
  modified_base 17: mod_base = OTHER; note = guanosine-3'-phosphate
  modified_base 18: mod_base = OTHER; note = guanosine-3'-phosphate
  modified_base 19: mod_base = OTHER; note = cytidine-3'-phosphate
  misc_feature 1..19: note = RNA
  misc_feature 20..21: note = DNA
ctgagtcaccctgacaggctt

SEQ ID NO: 1309 - DNA, 21 bp, synthetic construct
  source 1..21: mol_type = other DNA
  modified_base 1: mod_base = OTHER; note = adenosine-3'-phosphate
  modified_base 2: mod_base = OTHER; note = guanosine-3'-phosphate
  modified_base 3: mod_base = OTHER; note = cytidine-3'-phosphate
  modified_base 4: mod_base = OTHER; note = guanosine-3'-phosphate
  modified_base 5: mod_base = OTHER; note = guanosine-3'-phosphate
  modified_base 6: mod_base = OTHER; note = adenosine-3'-phosphate
  modified_base 7: mod_base = OTHER; note = cytidine-3'-phosphate
  modified_base 8: mod_base = OTHER; note = cytidine-3'-phosphate
  modified_base 9: mod_base = OTHER; note = adenosine-3'-phosphate
  modified_base 10: mod_base = OTHER; note = cytidine-3'-phosphate
  modified_base 11: mod_base = OTHER; note = cytidine-3'-phosphate
  modified_base 12: mod_base = OTHER; note = uridine-3'-phosphate
  modified_base 13: mod_base = OTHER; note = guanosine-3'-phosphate
  modified_base 14: mod_base = OTHER; note = adenosine-3'-phosphate
  modified_base 15: mod_base = OTHER; note = guanosine-3'-phosphate
  modified_base 16: mod_base = OTHER; note = uridine-3'-phosphate
  modified_base 17: mod_base = OTHER; note = cytidine-3'-phosphate
  modified_base 18: mod_base = OTHER; note = adenosine-3'-phosphate
  modified_base 19: mod_base = OTHER; note = cytidine-3'-phosphate
  misc_feature 1..19: note = RNA
  misc_feature 20..21: note = DNA
agcggaccacctgagtcactt

SEQ ID NO: 1310 - DNA, 21 bp, synthetic construct
  source 1..21: mol_type = other DNA
  modified_base 1: mod_base = OTHER; note = uridine-3'-phosphate
  modified_base 2: mod_base = OTHER; note = uridine-3'-phosphate
  modified_base 3: mod_base = OTHER; note = guanosine-3'-phosphate
  modified_base 4: mod_base = OTHER; note = cytidine-3'-phosphate
  modified_base 5: mod_base = OTHER; note = adenosine-3'-phosphate
  modified_base 6: mod_base = OTHER; note = cytidine-3'-phosphate
  modified_base 7: mod_base = OTHER; note = adenosine-3'-phosphate
  modified_base 8: mod_base = OTHER; note = cytidine-3'-phosphate
  modified_base 9: mod_base = OTHER; note = cytidine-3'-phosphate
  modified_base 10: mod_base = OTHER; note = adenosine-3'-phosphate
  modified_base 11: mod_base = OTHER; note = guanosine-3'-phosphate
  modified_base 12: mod_base = OTHER; note = cytidine-3'-phosphate
  modified_base 13: mod_base = OTHER; note = guanosine-3'-phosphate
  modified_base 14: mod_base = OTHER; note = guanosine-3'-phosphate
  modified_base 15: mod_base = OTHER; note = adenosine-3'-phosphate
  modified_base 16: mod_base = OTHER; note = cytidine-3'-phosphate
  modified_base 17: mod_base = OTHER; note = cytidine-3'-phosphate
  modified_base 18: mod_base = OTHER; note = adenosine-3'-phosphate
  modified_base 19: mod_base = OTHER; note = cytidine-3'-phosphate
  misc_feature 1..19: note = RNA
  misc_feature 20..21: note = DNA
ttgcacaccagcggaccactt

SEQ ID NO: 1311 - DNA, 21 bp, synthetic construct
  source 1..21: mol_type = other DNA
  modified_base 1: mod_base = OTHER; note = cytidine-3'-phosphate
  modified_base 2: mod_base = OTHER; note = uridine-3'-phosphate
  modified_base 3: mod_base = OTHER; note = guanosine-3'-phosphate
  modified_base 4: mod_base = OTHER; note = adenosine-3'-phosphate
  modified_base 5: mod_base = OTHER; note = guanosine-3'-phosphate
  modified_base 6: mod_base = OTHER; note = uridine-3'-phosphate
  modified_base 7: mod_base = OTHER; note = guanosine-3'-phosphate
  modified_base 8: mod_base = OTHER; note = cytidine-3'-phosphate
  modified_base 9: mod_base = OTHER; note = cytidine-3'-phosphate
  modified_base 10: mod_base = OTHER; note = uridine-3'-phosphate
  modified_base 11: mod_base = OTHER; note = uridine-3'-phosphate
  modified_base 12: mod_base = OTHER; note = guanosine-3'-phosphate
  modified_base 13: mod_base = OTHER; note = cytidine-3'-phosphate
  modified_base 14: mod_base = OTHER; note = adenosine-3'-phosphate
  modified_base 15: mod_base = OTHER; note = cytidine-3'-phosphate
  modified_base 16: mod_base = OTHER; note = adenosine-3'-phosphate
  modified_base 17: mod_base = OTHER; note = cytidine-3'-phosphate
  modified_base 18: mod_base = OTHER; note = cytidine-3'-phosphate
  modified_base 19: mod_base = OTHER; note = adenosine-3'-phosphate
  misc_feature 1..19: note = RNA
  misc_feature 20..21: note = DNA
ctgagtgccttgcacaccatt

SEQ ID NO: 1312 - DNA, 21 bp, synthetic construct
  source 1..21: mol_type = other DNA
  modified_base 1: mod_base = OTHER; note = adenosine-3'-phosphate
  modified_base 2: mod_base = OTHER; note = cytidine-3'-phosphate
  modified_base 3: mod_base = OTHER; note = cytidine-3'-phosphate
  modified_base 4: mod_base = OTHER; note = adenosine-3'-phosphate
  modified_base 5: mod_base = OTHER; note = guanosine-3'-phosphate
  modified_base 6: mod_base = OTHER; note = cytidine-3'-phosphate
  modified_base 7: mod_base = OTHER; note = guanosine-3'-phosphate
  modified_base 8: mod_base = OTHER; note = guanosine-3'-phosphate
  modified_base 9: mod_base = OTHER; note = cytidine-3'-phosphate
  modified_base 10: mod_base = OTHER; note = cytidine-3'-phosphate
  modified_base 11: mod_base = OTHER; note = adenosine-3'-phosphate
  modified_base 12: mod_base = OTHER; note = cytidine-3'-phosphate
  modified_base 13: mod_base = OTHER; note = uridine-3'-phosphate
  modified_base 14: mod_base = OTHER; note = guanosine-3'-phosphate
  modified_base 15: mod_base = OTHER; note = adenosine-3'-phosphate
  modified_base 16: mod_base = OTHER; note = guanosine-3'-phosphate
  modified_base 17: mod_base = OTHER; note = uridine-3'-phosphate
  modified_base 18: mod_base = OTHER; note = guanosine-3'-phosphate
  modified_base 19: mod_base = OTHER; note = cytidine-3'-phosphate
  misc_feature 1..19: note = RNA
  misc_feature 20..21: note = DNA
accagcggccactgagtgctt

SEQ ID NO: 1313 - DNA, 21 bp, synthetic construct
  source 1..21: mol_type = other DNA
  modified_base 1: mod_base = OTHER; note = cytidine-3'-phosphate
  modified_base 2: mod_base = OTHER; note = cytidine-3'-phosphate
  modified_base 3: mod_base = OTHER; note = cytidine-3'-phosphate
  modified_base 4: mod_base = OTHER; note = guanosine-3'-phosphate
  modified_base 5: mod_base = OTHER; note = cytidine-3'-phosphate
  modified_base 6: mod_base = OTHER; note = cytidine-3'-phosphate
  modified_base 7: mod_base = OTHER; note = adenosine-3'-phosphate
  modified_base 8: mod_base = OTHER; note = guanosine-3'-phosphate
  modified_base 9: mod_base = OTHER; note = guanosine-3'-phosphate
  modified_base 10: mod_base = OTHER; note = adenosine-3'-phosphate
  modified_base 11: mod_base = OTHER; note = adenosine-3'-phosphate
  modified_base 12: mod_base = OTHER; note = cytidine-3'-phosphate
  modified_base 13: mod_base = OTHER; note = cytidine-3'-phosphate
  modified_base 14: mod_base = OTHER; note = adenosine-3'-phosphate
  modified_base 15: mod_base = OTHER; note = guanosine-3'-phosphate
  modified_base 16: mod_base = OTHER; note = cytidine-3'-phosphate
  modified_base 17: mod_base = OTHER; note = guanosine-3'-phosphate
  modified_base 18: mod_base = OTHER; note = guanosine-3'-phosphate
  modified_base 19: mod_base = OTHER; note = cytidine-3'-phosphate
  misc_feature 1..19: note = RNA
  misc_feature 20..21: note = DNA
cccgccaggaaccagcggctt

SEQ ID NO: 1314 - DNA, 21 bp, synthetic construct
  source 1..21: mol_type = other DNA
  modified_base 1: mod_base = OTHER; note = cytidine-3'-phosphate
  modified_base 2: mod_base = OTHER; note = uridine-3'-phosphate
  modified_base 3: mod_base = OTHER; note = guanosine-3'-phosphate
  modified_base 4: mod_base = OTHER; note = adenosine-3'-phosphate
  modified_base 5: mod_base = OTHER; note = cytidine-3'-phosphate
  modified_base 6: mod_base = OTHER; note = cytidine-3'-phosphate
  modified_base 7: mod_base = OTHER; note = adenosine-3'-phosphate
  modified_base 8: mod_base = OTHER; note = guanosine-3'-phosphate
  modified_base 9: mod_base = OTHER; note = cytidine-3'-phosphate
  modified_base 10: mod_base = OTHER; note = cytidine-3'-phosphate
  modified_base 11: mod_base = OTHER; note = cytidine-3'-phosphate
  modified_base 12: mod_base = OTHER; note = cytidine-3'-phosphate
  modified_base 13: mod_base = OTHER; note = guanosine-3'-phosphate
  modified_base 14: mod_base = OTHER; note = cytidine-3'-phosphate
  modified_base 15: mod_base = OTHER; note = cytidine-3'-phosphate
  modified_base 16: mod_base = OTHER; note = adenosine-3'-phosphate
  modified_base 17: mod_base = OTHER; note = guanosine-3'-phosphate
  modified_base 18: mod_base = OTHER; note = guanosine-3'-phosphate
  modified_base 19: mod_base = OTHER; note = adenosine-3'-phosphate
  misc_feature 1..19: note = RNA
  misc_feature 20..21: note = DNA
ctgaccagccccgccaggatt

SEQ ID NO: 1315 - DNA, 21 bp, synthetic construct
  source 1..21: mol_type = other DNA
  modified_base 1: mod_base = OTHER; note = cytidine-3'-phosphate
  modified_base 2: mod_base = OTHER; note = adenosine-3'-phosphate
  modified_base 3: mod_base = OTHER; note = guanosine-3'-phosphate
  modified_base 4: mod_base = OTHER; note = guanosine-3'-phosphate
  modified_base 5: mod_base = OTHER; note = cytidine-3'-phosphate
  modified_base 6: mod_base = OTHER; note = cytidine-3'-phosphate
  modified_base 7: mod_base = OTHER; note = cytidine-3'-phosphate
  modified_base 8: mod_base = OTHER; note = cytidine-3'-phosphate
  modified_base 9: mod_base = OTHER; note = adenosine-3'-phosphate
  modified_base 10: mod_base = OTHER; note = guanosine-3'-phosphate
  modified_base 11: mod_base = OTHER; note = cytidine-3'-phosphate
  modified_base 12: mod_base = OTHER; note = uridine-3'-phosphate
  modified_base 13: mod_base = OTHER; note = guanosine-3'-phosphate
  modified_base 14: mod_base = OTHER; note = adenosine-3'-phosphate
  modified_base 15: mod_base = OTHER; note = cytidine-3'-phosphate
  modified_base 16: mod_base = OTHER; note = cytidine-3'-phosphate
  modified_base 17: mod_base = OTHER; note = adenosine-3'-phosphate
  modified_base 18: mod_base = OTHER; note = guanosine-3'-phosphate
  modified_base 19: mod_base = OTHER; note = cytidine-3'-phosphate
  misc_feature 1..19: note = RNA
  misc_feature 20..21: note = DNA
caggccccagctgaccagctt

SEQ ID NO: 1316 - DNA, 21 bp, synthetic construct
  source 1..21: mol_type = other DNA
  modified_base 1: mod_base = OTHER; note = cytidine-3'-phosphate
  modified_base 2: mod_base = OTHER; note = cytidine-3'-phosphate
  modified_base 3: mod_base = OTHER; note = guanosine-3'-phosphate
  modified_base 4: mod_base = OTHER; note = guanosine-3'-phosphate
  modified_base 5: mod_base = OTHER; note = cytidine-3'-phosphate
  modified_base 6: mod_base = OTHER; note = cytidine-3'-phosphate
  modified_base 7: mod_base = OTHER; note = adenosine-3'-phosphate
  modified_base 8: mod_base = OTHER; note = cytidine-3'-phosphate
  modified_base 9: mod_base = OTHER; note = adenosine-3'-phosphate
  modified_base 10: mod_base = OTHER; note = guanosine-3'-phosphate
  modified_base 11: mod_base = OTHER; note = cytidine-3'-phosphate
  modified_base 12: mod_base = OTHER; note = cytidine-3'-phosphate
  modified_base 13: mod_base = OTHER; note = cytidine-3'-phosphate
  modified_base 14: mod_base = OTHER; note = adenosine-3'-phosphate
  modified_base 15: mod_base = OTHER; note = guanosine-3'-phosphate
  modified_base 16: mod_base = OTHER; note = guanosine-3'-phosphate
  modified_base 17: mod_base = OTHER; note = cytidine-3'-phosphate
  modified_base 18: mod_base = OTHER; note = cytidine-3'-phosphate
  modified_base 19: mod_base = OTHER; note = cytidine-3'-phosphate
  misc_feature 1..19: note = RNA
  misc_feature 20..21: note = DNA
ccggccacagcccaggccctt

SEQ ID NO: 1317 - DNA, 21 bp, synthetic construct
  source 1..21: mol_type = other DNA
  modified_base 1: mod_base = OTHER; note = adenosine-3'-phosphate
  modified_base 2: mod_base = OTHER; note = guanosine-3'-phosphate
  modified_base 3: mod_base = OTHER; note = uridine-3'-phosphate
  modified_base 4: mod_base = OTHER; note = uridine-3'-phosphate
  modified_base 5: mod_base = OTHER; note = adenosine-3'-phosphate
  modified_base 6: mod_base = OTHER; note = guanosine-3'-phosphate
  modified_base 7: mod_base = OTHER; note = guanosine-3'-phosphate
  modified_base 8: mod_base = OTHER; note = cytidine-3'-phosphate
  modified_base 9: mod_base = OTHER; note = cytidine-3'-phosphate
  modified_base 10: mod_base = OTHER; note = guanosine-3'-phosphate
  modified_base 11: mod_base = OTHER; note = guanosine-3'-phosphate
  modified_base 12: mod_base = OTHER; note = cytidine-3'-phosphate
  modified_base 13: mod_base = OTHER; note = cytidine-3'-phosphate
  modified_base 14: mod_base = OTHER; note = adenosine-3'-phosphate
  modified_base 15: mod_base = OTHER; note = cytidine-3'-phosphate
  modified_base 16: mod_base = OTHER; note = adenosine-3'-phosphate
  modified_base 17: mod_base = OTHER; note = guanosine-3'-phosphate
  modified_base 18: mod_base = OTHER; note = cytidine-3'-phosphate
  modified_base 19: mod_base = OTHER; note = cytidine-3'-phosphate
  misc_feature 1..19: note = RNA
  misc_feature 20..21: note = DNA
agttaggccggccacagcctt

SEQ ID NO: 1318 - DNA, 21 bp, synthetic construct
  source 1..21: mol_type = other DNA
  modified_base 1: mod_base = OTHER; note = uridine-3'-phosphate
  modified_base 2: mod_base = OTHER; note = adenosine-3'-phosphate
  modified_base 3: mod_base = OTHER; note = guanosine-3'-phosphate
  modified_base 4: mod_base = OTHER; note = adenosine-3'-phosphate
  modified_base 5: mod_base = OTHER; note = cytidine-3'-phosphate
  modified_base 6: mod_base = OTHER; note = guanosine-3'-phosphate
  modified_base 7: mod_base = OTHER; note = cytidine-3'-phosphate
  modified_base 8: mod_base = OTHER; note = cytidine-3'-phosphate
  modified_base 9: mod_base = OTHER; note = guanosine-3'-phosphate
  modified_base 10: mod_base = OTHER; note = adenosine-3'-phosphate
  modified_base 11: mod_base = OTHER; note = adenosine-3'-phosphate
  modified_base 12: mod_base = OTHER; note = guanosine-3'-phosphate
  modified_base 13: mod_base = OTHER; note = uridine-3'-phosphate
  modified_base 14: mod_base = OTHER; note = adenosine-3'-phosphate
  modified_base 15: mod_base = OTHER; note = guanosine-3'-phosphate
  modified_base 16: mod_base = OTHER; note = uridine-3'-phosphate
  modified_base 17: mod_base = OTHER; note = uridine-3'-phosphate
  modified_base 18: mod_base = OTHER; note = adenosine-3'-phosphate
  modified_base 19: mod_base = OTHER; note = guanosine-3'-phosphate
  misc_feature 1..19: note = RNA
  misc_feature 20..21: note = DNA
tagacgccgaagtagttagtt

SEQ ID NO: 1319 - DNA, 21 bp, synthetic construct
  source 1..21: mol_type = other DNA
  modified_base 1: mod_base = OTHER; note = guanosine-3'-phosphate
  modified_base 2: mod_base = OTHER; note = adenosine-3'-phosphate
  modified_base 3: mod_base = OTHER; note = uridine-3'-phosphate
  modified_base 4: mod_base = OTHER; note = guanosine-3'-phosphate
  modified_base 5: mod_base = OTHER; note = cytidine-3'-phosphate
  modified_base 6: mod_base = OTHER; note = guanosine-3'-phosphate
  modified_base 7: mod_base = OTHER; note = guanosine-3'-phosphate
  modified_base 8: mod_base = OTHER; note = guanosine-3'-phosphate
  modified_base 9: mod_base = OTHER; note = uridine-3'-phosphate
  modified_base 10: mod_base = OTHER; note = guanosine-3'-phosphate
  modified_base 11: mod_base = OTHER; note = uridine-3'-phosphate
  modified_base 12: mod_base = OTHER; note = adenosine-3'-phosphate
  modified_base 13: mod_base = OTHER; note = guanosine-3'-phosphate
  modified_base 14: mod_base = OTHER; note = adenosine-3'-phosphate
  modified_base 15: mod_base = OTHER; note = cytidine-3'-phosphate
  modified_base 16: mod_base = OTHER; note = guanosine-3'-phosphate
  modified_base 17: mod_base = OTHER; note = cytidine-3'-phosphate
  modified_base 18: mod_base = OTHER; note = cytidine-3'-phosphate
  modified_base 19: mod_base = OTHER; note = guanosine-3'-phosphate
  misc_feature 1..19: note = RNA
  misc_feature 20..21: note = DNA
gatgcgggtgtagacgccgtt

SEQ ID NO: 1320 - DNA, 21 bp, synthetic construct
  source 1..21: mol_type = other DNA
  modified_base 1: mod_base = OTHER; note = adenosine-3'-phosphate
  modified_base 2: mod_base = OTHER; note = cytidine-3'-phosphate
  modified_base 3: mod_base = OTHER; note = adenosine-3'-phosphate
  modified_base 4: mod_base = OTHER; note = cytidine-3'-phosphate
  modified_base 5: mod_base = OTHER; note = cytidine-3'-phosphate
  modified_base 6: mod_base = OTHER; note = uridine-3'-phosphate
  modified_base 7: mod_base = OTHER; note = guanosine-3'-phosphate
  modified_base 8: mod_base = OTHER; note = uridine-3'-phosphate
  modified_base 9: mod_base = OTHER; note = guanosine-3'-phosphate
  modified_base 10: mod_base = OTHER; note = adenosine-3'-phosphate
  modified_base 11: mod_base = OTHER; note = uridine-3'-phosphate
  modified_base 12: mod_base = OTHER; note = guanosine-3'-phosphate
  modified_base 13: mod_base = OTHER; note = cytidine-3'-phosphate
  modified_base 14: mod_base = OTHER; note = guanosine-3'-phosphate
  modified_base 15: mod_base = OTHER; note = guanosine-3'-phosphate
  modified_base 16: mod_base = OTHER; note = guanosine-3'-phosphate
  modified_base 17: mod_base = OTHER; note = uridine-3'-phosphate
  modified_base 18: mod_base = OTHER; note = guanosine-3'-phosphate
  modified_base 19: mod_base = OTHER; note = uridine-3'-phosphate
  misc_feature 1..19: note = RNA
  misc_feature 20..21: note = DNA
acacctgtgatgcgggtgttt

SEQ ID NO: 1321 - DNA, 21 bp, synthetic construct
  source 1..21: mol_type = other DNA
  modified_base 1: mod_base = OTHER; note = uridine-3'-phosphate
  modified_base 2: mod_base = OTHER; note = cytidine-3'-phosphate
  modified_base 3: mod_base = OTHER; note = cytidine-3'-phosphate
  modified_base 4: mod_base = OTHER; note = adenosine-3'-phosphate
  modified_base 5: mod_base = OTHER; note = guanosine-3'-phosphate
  modified_base 6: mod_base = OTHER; note = cytidine-3'-phosphate
  modified_base 7: mod_base = OTHER; note = uridine-3'-phosphate
  modified_base 8: mod_base = OTHER; note = guanosine-3'-phosphate
  modified_base 9: mod_base = OTHER; note = adenosine-3'-phosphate
  modified_base 10: mod_base = OTHER; note = uridine-3'-phosphate
  modified_base 11: mod_base = OTHER; note = cytidine-3'-phosphate
  modified_base 12: mod_base = OTHER; note = adenosine-3'-phosphate
  modified_base 13: mod_base = OTHER; note = cytidine-3'-phosphate
  modified_base 14: mod_base = OTHER; note = adenosine-3'-phosphate
  modified_base 15: mod_base = OTHER; note = cytidine-3'-phosphate
  modified_base 16: mod_base = OTHER; note = cytidine-3'-phosphate
  modified_base 17: mod_base = OTHER; note = uridine-3'-phosphate
  modified_base 18: mod_base = OTHER; note = guanosine-3'-phosphate
  modified_base 19: mod_base = OTHER; note = uridine-3'-phosphate
  misc_feature 1..19: note = RNA
  misc_feature 20..21: note = DNA
tccagctgatcacacctgttt

SEQ ID NO: 1322 - DNA, 21 bp, synthetic construct
  source 1..21: mol_type = other DNA
  modified_base 1: mod_base = OTHER; note = adenosine-3'-phosphate
  modified_base 2: mod_base = OTHER; note = cytidine-3'-phosphate
  modified_base 3: mod_base = OTHER; note = uridine-3'-phosphate
  modified_base 4: mod_base = OTHER; note = uridine-3'-phosphate
  modified_base 5: mod_base = OTHER; note = guanosine-3'-phosphate
  modified_base 6: mod_base = OTHER; note = cytidine-3'-phosphate
  modified_base 7: mod_base = OTHER; note = uridine-3'-phosphate
  modified_base 8: mod_base = OTHER; note = guanosine-3'-phosphate
  modified_base 9: mod_base = OTHER; note = guanosine-3'-phosphate
  modified_base 10: mod_base = OTHER; note = adenosine-3'-phosphate
  modified_base 11: mod_base = OTHER; note = uridine-3'-phosphate
  modified_base 12: mod_base = OTHER; note = cytidine-3'-phosphate
  modified_base 13: mod_base = OTHER; note = cytidine-3'-phosphate
  modified_base 14: mod_base = OTHER; note = adenosine-3'-phosphate
  modified_base 15: mod_base = OTHER; note = guanosine-3'-phosphate
  modified_base 16: mod_base = OTHER; note = cytidine-3'-phosphate
  modified_base 17: mod_base = OTHER; note = uridine-3'-phosphate
  modified_base 18: mod_base = OTHER; note = guanosine-3'-phosphate
  modified_base 19: mod_base = OTHER; note = adenosine-3'-phosphate
  misc_feature 1..19: note = RNA
  misc_feature 20..21: note = DNA
acttgctggatccagctgatt

SEQ ID NO: 1323 - DNA, 21 bp, synthetic construct
  source 1..21: mol_type = other DNA
  modified_base 1: mod_base = OTHER; note = cytidine-3'-phosphate
  modified_base 2: mod_base = OTHER; note = uridine-3'-phosphate
  modified_base 3: mod_base = OTHER; note = cytidine-3'-phosphate
  modified_base 4: mod_base = OTHER; note = adenosine-3'-phosphate
  modified_base 5: mod_base = OTHER; note = guanosine-3'-phosphate
  modified_base 6: mod_base = OTHER; note = guanosine-3'-phosphate
  modified_base 7: mod_base = OTHER; note = uridine-3'-phosphate
  modified_base 8: mod_base = OTHER; note = cytidine-3'-phosphate
  modified_base 9: mod_base = OTHER; note = adenosine-3'-phosphate
  modified_base 10: mod_base = OTHER; note = cytidine-3'-phosphate
  modified_base 11: mod_base = OTHER; note = cytidine-3'-phosphate
  modified_base 12: mod_base = OTHER; note = adenosine-3'-phosphate
  modified_base 13: mod_base = OTHER; note = cytidine-3'-phosphate
  modified_base 14: mod_base = OTHER; note = uridine-3'-phosphate
  modified_base 15: mod_base = OTHER; note = uridine-3'-phosphate
  modified_base 16: mod_base = OTHER; note = guanosine-3'-phosphate
  modified_base 17: mod_base = OTHER; note = cytidine-3'-phosphate
  modified_base 18: mod_base = OTHER; note = uridine-3'-phosphate
  modified_base 19: mod_base = OTHER; note = guanosine-3'-phosphate
  misc_feature 1..19: note = RNA
  misc_feature 20..21: note = DNA
ctcaggtcaccacttgctgtt

SEQ ID NO: 1324 - DNA, 21 bp, synthetic construct
  source 1..21: mol_type = other DNA
  modified_base 1: mod_base = OTHER; note = guanosine-3'-phosphate
  modified_base 2: mod_base = OTHER; note = guanosine-3'-phosphate
  modified_base 3: mod_base = OTHER; note = guanosine-3'-phosphate
  modified_base 4: mod_base = OTHER; note = guanosine-3'-phosphate
  modified_base 5: mod_base = OTHER; note = cytidine-3'-phosphate
  modified_base 6: mod_base = OTHER; note = adenosine-3'-phosphate
  modified_base 7: mod_base = OTHER; note = guanosine-3'-phosphate
  modified_base 8: mod_base = OTHER; note = uridine-3'-phosphate
  modified_base 9: mod_base = OTHER; note = uridine-3'-phosphate
  modified_base 10: mod_base = OTHER; note = cytidine-3'-phosphate
  modified_base 11: mod_base = OTHER; note = cytidine-3'-phosphate
  modified_base 12: mod_base = OTHER; note = uridine-3'-phosphate
  modified_base 13: mod_base = OTHER; note = cytidine-3'-phosphate
  modified_base 14: mod_base = OTHER; note = adenosine-3'-phosphate
  modified_base 15: mod_base = OTHER; note = guanosine-3'-phosphate
  modified_base 16: mod_base = OTHER; note = guanosine-3'-phosphate
  modified_base 17: mod_base = OTHER; note = uridine-3'-phosphate
  modified_base 18: mod_base = OTHER; note = cytidine-3'-phosphate
  modified_base 19: mod_base = OTHER; note = adenosine-3'-phosphate
  misc_feature 1..19: note = RNA
  misc_feature 20..21: note = DNA
ggggcagttcctcaggtcatt

SEQ ID NO: 1325 - DNA, 21 bp, synthetic construct
  source 1..21: mol_type = other DNA
  modified_base 1: mod_base = OTHER; note = uridine-3'-phosphate
  modified_base 2: mod_base = OTHER; note = uridine-3'-phosphate
  modified_base 3: mod_base = OTHER; note = uridine-3'-phosphate
  modified_base 4: mod_base = OTHER; note = guanosine-3'-phosphate
  modified_base 5: mod_base = OTHER; note = cytidine-3'-phosphate
  modified_base 6: mod_base = OTHER; note = adenosine-3'-phosphate
  modified_base 7: mod_base = OTHER; note = guanosine-3'-phosphate
  modified_base 8: mod_base = OTHER; note = guanosine-3'-phosphate
  modified_base 9: mod_base = OTHER; note = guanosine-3'-phosphate
  modified_base 10: mod_base = OTHER; note = guanosine-3'-phosphate
  modified_base 11: mod_base = OTHER; note = guanosine-3'-phosphate
  modified_base 12: mod_base = OTHER; note = guanosine-3'-phosphate
  modified_base 13: mod_base = OTHER; note = cytidine-3'-phosphate
  modified_base 14: mod_base = OTHER; note = adenosine-3'-phosphate
  modified_base 15: mod_base = OTHER; note = guanosine-3'-phosphate
  modified_base 16: mod_base = OTHER; note = uridine-3'-phosphate
  modified_base 17: mod_base = OTHER; note = uridine-3'-phosphate
  modified_base 18: mod_base = OTHER; note = cytidine-3'-phosphate
  modified_base 19: mod_base = OTHER; note = cytidine-3'-phosphate
  misc_feature 1..19: note = RNA
  misc_feature 20..21: note = DNA
tttgcaggggggcagttcctt

SEQ ID NO: 1326 - DNA, 21 bp, synthetic construct
  source 1..21: mol_type = other DNA
  modified_base 1: mod_base = OTHER; note = guanosine-3'-phosphate
  modified_base 2: mod_base = OTHER; note = guanosine-3'-phosphate
  modified_base 3: mod_base = OTHER; note = uridine-3'-phosphate
  modified_base 4: mod_base = OTHER; note = guanosine-3'-phosphate
  modified_base 5: mod_base = OTHER; note = guanosine-3'-phosphate
  modified_base 6: mod_base = OTHER; note = guanosine-3'-phosphate
  modified_base 7: mod_base = OTHER; note = cytidine-3'-phosphate
  modified_base 8: mod_base = OTHER; note = cytidine-3'-phosphate
  modified_base 9: mod_base = OTHER; note = cytidine-3'-phosphate
  modified_base 10: mod_base = OTHER; note = uridine-3'-phosphate
  modified_base 11: mod_base = OTHER; note = guanosine-3'-phosphate
  modified_base 12: mod_base = OTHER; note = cytidine-3'-phosphate
  modified_base 13: mod_base = OTHER; note = uridine-3'-phosphate
  modified_base 14: mod_base = OTHER; note = uridine-3'-phosphate
  modified_base 15: mod_base = OTHER; note = uridine-3'-phosphate
  modified_base 16: mod_base = OTHER; note = guanosine-3'-phosphate
  modified_base 17: mod_base = OTHER; note = cytidine-3'-phosphate
  modified_base 18: mod_base = OTHER; note = adenosine-3'-phosphate
  modified_base 19: mod_base = OTHER; note = guanosine-3'-phosphate
  misc_feature 1..19: note = RNA
  misc_feature 20..21: note = DNA
ggtgggccctgctttgcagtt

SEQ ID NO: 1327 - DNA, 21 bp, synthetic construct
  source 1..21: mol_type = other DNA
  modified_base 1: mod_base = OTHER; note = uridine-3'-phosphate
  modified_base 2: mod_base = OTHER; note = cytidine-3'-phosphate
  modified_base 3: mod_base = OTHER; note = cytidine-3'-phosphate
  modified_base 4: mod_base = OTHER; note = adenosine-3'-phosphate
  modified_base 5: mod_base = OTHER; note = guanosine-3'-phosphate
  modified_base 6: mod_base = OTHER; note = guanosine-3'-phosphate
  modified_base 7: mod_base = OTHER; note = adenosine-3'-phosphate
  modified_base 8: mod_base = OTHER; note = guanosine-3'-phosphate
  modified_base 9: mod_base = OTHER; note = guanosine-3'-phosphate
  modified_base 10: mod_base = OTHER; note = uridine-3'-phosphate
  modified_base 11: mod_base = OTHER; note = guanosine-3'-phosphate
  modified_base 12: mod_base = OTHER; note = guanosine-3'-phosphate
  modified_base 13: mod_base = OTHER; note = guanosine-3'-phosphate
  modified_base 14: mod_base = OTHER; note = cytidine-3'-phosphate
  modified_base 15: mod_base = OTHER; note = cytidine-3'-phosphate
  modified_base 16: mod_base = OTHER; note = cytidine-3'-phosphate
  modified_base 17: mod_base = OTHER; note = uridine-3'-phosphate
  modified_base 18: mod_base = OTHER; note = guanosine-3'-phosphate
  modified_base 19: mod_base = OTHER; note = cytidine-3'-phosphate
  misc_feature 1..19: note = RNA
  misc_feature 20..21: note = DNA
tccaggaggtgggccctgctt

SEQ ID NO: 1328 - DNA, 21 bp, synthetic construct
  source 1..21: mol_type = other DNA
  modified_base 1: mod_base = OTHER; note = guanosine-3'-phosphate
  modified_base 2: mod_base = OTHER; note = cytidine-3'-phosphate
  modified_base 3: mod_base = OTHER; note = uridine-3'-phosphate
  modified_base 4: mod_base = OTHER; note = cytidine-3'-phosphate
  modified_base 5: mod_base = OTHER; note = uridine-3'-phosphate
  modified_base 6: mod_base = OTHER; note = cytidine-3'-phosphate
  modified_base 7: mod_base = OTHER; note = uridine-3'-phosphate
  modified_base 8: mod_base = OTHER; note = guanosine-3'-phosphate
  modified_base 9: mod_base = OTHER; note = adenosine-3'-phosphate
  modified_base 10: mod_base = OTHER; note = guanosine-3'-phosphate
  modified_base 11: mod_base = OTHER; note = uridine-3'-phosphate
  modified_base 12: mod_base = OTHER; note = cytidine-3'-phosphate
  modified_base 13: mod_base = OTHER; note = cytidine-3'-phosphate
  modified_base 14: mod_base = OTHER; note = adenosine-3'-phosphate
  modified_base 15: mod_base = OTHER; note = guanosine-3'-phosphate
  modified_base 16: mod_base = OTHER; note = guanosine-3'-phosphate
  modified_base 17: mod_base = OTHER; note = adenosine-3'-phosphate
  modified_base 18: mod_base = OTHER; note = guanosine-3'-phosphate
  modified_base 19: mod_base = OTHER; note = guanosine-3'-phosphate
  misc_feature 1..19: note = RNA
  misc_feature 20..21: note = DNA
gctctctgagtccaggaggtt

SEQ ID NO: 1329 - DNA, 21 bp, synthetic construct
  source 1..21: mol_type = other DNA
  modified_base 1: mod_base = OTHER; note = uridine-3'-phosphate
  modified_base 2: mod_base = OTHER; note = uridine-3'-phosphate
  modified_base 3: mod_base = OTHER; note = guanosine-3'-phosphate
  modified_base 4: mod_base = OTHER; note = cytidine-3'-phosphate
  modified_base 5: mod_base = OTHER; note = cytidine-3'-phosphate
  modified_base 6: mod_base = OTHER; note = cytidine-3'-phosphate
  modified_base 7: mod_base = OTHER; note = uridine-3'-phosphate
  modified_base 8: mod_base = OTHER; note = guanosine-3'-phosphate
  modified_base 9: mod_base = OTHER; note = guanosine-3'-phosphate
  modified_base 10: mod_base = OTHER; note = guanosine-3'-phosphate
  modified_base 11: mod_base = OTHER; note = cytidine-3'-phosphate
  modified_base 12: mod_base = OTHER; note = uridine-3'-phosphate
  modified_base 13: mod_base = OTHER; note = cytidine-3'-phosphate
  modified_base 14: mod_base = OTHER; note = uridine-3'-phosphate
  modified_base 15: mod_base = OTHER; note = cytidine-3'-phosphate
  modified_base 16: mod_base = OTHER; note = uridine-3'-phosphate
  modified_base 17: mod_base = OTHER; note = guanosine-3'-phosphate
  modified_base 18: mod_base = OTHER; note = adenosine-3'-phosphate
  modified_base 19: mod_base = OTHER; note = guanosine-3'-phosphate
  misc_feature 1..19: note = RNA
  misc_feature 20..21: note = DNA
ttgccctgggctctctgagtt

SEQ ID NO: 1330 - DNA, 21 bp, synthetic construct
  source 1..21: mol_type = other DNA
  modified_base 1: mod_base = OTHER; note = uridine-3'-phosphate
  modified_base 2: mod_base = OTHER; note = guanosine-3'-phosphate
  modified_base 3: mod_base = OTHER; note = cytidine-3'-phosphate
  modified_base 4: mod_base = OTHER; note = uridine-3'-phosphate
  modified_base 5: mod_base = OTHER; note = uridine-3'-phosphate
  modified_base 6: mod_base = OTHER; note = guanosine-3'-phosphate
  modified_base 7: mod_base = OTHER; note = guanosine-3'-phosphate
  modified_base 8: mod_base = OTHER; note = cytidine-3'-phosphate
  modified_base 9: mod_base = OTHER; note = adenosine-3'-phosphate
  modified_base 10: mod_base = OTHER; note = guanosine-3'-phosphate
  modified_base 11: mod_base = OTHER; note = uridine-3'-phosphate
  modified_base 12: mod_base = OTHER; note = uridine-3'-phosphate
  modified_base 13: mod_base = OTHER; note = guanosine-3'-phosphate
  modified_base 14: mod_base = OTHER; note = cytidine-3'-phosphate
  modified_base 15: mod_base = OTHER; note = cytidine-3'-phosphate
  modified_base 16: mod_base = OTHER; note = cytidine-3'-phosphate
  modified_base 17: mod_base = OTHER; note = uridine-3'-phosphate
  modified_base 18: mod_base = OTHER; note = guanosine-3'-phosphate
  modified_base 19: mod_base = OTHER; note = guanosine-3'-phosphate
  misc_feature 1..19: note = RNA
  misc_feature 20..21: note = DNA
tgcttggcagttgccctggtt

SEQ ID NO: 1331 - DNA, 21 bp, synthetic construct
  source 1..21: mol_type = other DNA
  modified_base 1: mod_base = OTHER; note = cytidine-3'-phosphate
  modified_base 2: mod_base = OTHER; note = cytidine-3'-phosphate
  modified_base 3: mod_base = OTHER; note = cytidine-3'-phosphate
  modified_base 4: mod_base = OTHER; note = guanosine-3'-phosphate
  modified_base 5: mod_base = OTHER; note = cytidine-3'-phosphate
  modified_base 6: mod_base = OTHER; note = cytidine-3'-phosphate
  modified_base 7: mod_base = OTHER; note = adenosine-3'-phosphate
  modified_base 8: mod_base = OTHER; note = guanosine-3'-phosphate
  modified_base 9: mod_base = OTHER; note = adenosine-3'-phosphate
  modified_base 10: mod_base = OTHER; note = adenosine-3'-phosphate
  modified_base 11: mod_base = OTHER; note = uridine-3'-phosphate
  modified_base 12: mod_base = OTHER; note = adenosine-3'-phosphate
  modified_base 13: mod_base = OTHER; note = cytidine-3'-phosphate
  modified_base 14: mod_base = OTHER; note = uridine-3'-phosphate
  modified_base 15: mod_base = OTHER; note = uridine-3'-phosphate
  modified_base 16: mod_base = OTHER; note = guanosine-3'-phosphate
  modified_base 17: mod_base = OTHER; note = uridine-3'-phosphate
  modified_base 18: mod_base = OTHER; note = cytidine-3'-phosphate
  modified_base 19: mod_base = OTHER; note = cytidine-3'-phosphate
  misc_feature 1..19: note = RNA
  misc_feature 20..21: note = DNA
cccgccagaatacttgtcctt

SEQ ID NO: 1332 - DNA, 21 bp, synthetic construct
  source 1..21: mol_type = other DNA
  modified_base 1: mod_base = OTHER; note = cytidine-3'-phosphate
  modified_base 2: mod_base = OTHER; note = uridine-3'-phosphate
  modified_base 3: mod_base = OTHER; note = cytidine-3'-phosphate
  modified_base 4: mod_base = OTHER; note = cytidine-3'-phosphate
  modified_base 5: mod_base = OTHER; note = cytidine-3'-phosphate
  modified_base 6: mod_base = OTHER; note = cytidine-3'-phosphate
  modified_base 7: mod_base = OTHER; note = cytidine-3'-phosphate
  modified_base 8: mod_base = OTHER; note = adenosine-3'-phosphate
  modified_base 9: mod_base = OTHER; note = cytidine-3'-phosphate
  modified_base 10: mod_base = OTHER; note = cytidine-3'-phosphate
  modified_base 11: mod_base = OTHER; note = cytidine-3'-phosphate
  modified_base 12: mod_base = OTHER; note = cytidine-3'-phosphate
  modified_base 13: mod_base = OTHER; note = cytidine-3'-phosphate
  modified_base 14: mod_base = OTHER; note = cytidine-3'-phosphate
  modified_base 15: mod_base = OTHER; note = guanosine-3'-phosphate
  modified_base 16: mod_base = OTHER; note = cytidine-3'-phosphate
  modified_base 17: mod_base = OTHER; note = cytidine-3'-phosphate
  modified_base 18: mod_base = OTHER; note = adenosine-3'-phosphate
  modified_base 19: mod_base = OTHER; note = guanosine-3'-phosphate
  misc_feature 1..19: note = RNA
  misc_feature 20..21: note = DNA
ctcccccaccccccgccagtt

SEQ ID NO: 1333 - DNA, 21 bp, synthetic construct
  source 1..21: mol_type = other DNA
  modified_base 1: mod_base = OTHER; note = cytidine-3'-phosphate
  modified_base 2: mod_base = OTHER; note = cytidine-3'-phosphate
  modified_base 3: mod_base = OTHER; note = uridine-3'-phosphate
  modified_base 4: mod_base = OTHER; note = guanosine-3'-phosphate
  modified_base 5: mod_base = OTHER; note = cytidine-3'-phosphate
  modified_base 6: mod_base = OTHER; note = uridine-3'-phosphate
  modified_base 7: mod_base = OTHER; note = cytidine-3'-phosphate
  modified_base 8: mod_base = OTHER; note = uridine-3'-phosphate
  modified_base 9: mod_base = OTHER; note = cytidine-3'-phosphate
  modified_base 10: mod_base = OTHER; note = uridine-3'-phosphate
  modified_base 11: mod_base = OTHER; note = cytidine-3'-phosphate
  modified_base 12: mod_base = OTHER; note = cytidine-3'-phosphate
  modified_base 13: mod_base = OTHER; note = cytidine-3'-phosphate
  modified_base 14: mod_base = OTHER; note = cytidine-3'-phosphate
  modified_base 15: mod_base = OTHER; note = cytidine-3'-phosphate
  modified_base 16: mod_base = OTHER; note = adenosine-3'-phosphate
  modified_base 17: mod_base = OTHER; note = cytidine-3'-phosphate
  modified_base 18: mod_base = OTHER; note = cytidine-3'-phosphate
  modified_base 19: mod_base = OTHER; note = cytidine-3'-phosphate
  misc_feature 1..19: note = RNA
  misc_feature 20..21: note = DNA
cctgctctctcccccaccctt

SEQ ID NO: 1334 - DNA, 21 bp, synthetic construct
  source 1..21: mol_type = other DNA
  modified_base 1: mod_base = OTHER; note = adenosine-3'-phosphate
  modified_base 2: mod_base = OTHER; note = cytidine-3'-phosphate
  modified_base 3: mod_base = OTHER; note = cytidine-3'-phosphate
  modified_base 4: mod_base = OTHER; note = adenosine-3'-phosphate
  modified_base 5: mod_base = OTHER; note = cytidine-3'-phosphate
  modified_base 6: mod_base = OTHER; note = adenosine-3'-phosphate
  modified_base 7: mod_base = OTHER; note = guanosine-3'-phosphate
  modified_base 8: mod_base = OTHER; note = guanosine-3'-phosphate
  modified_base 9: mod_base = OTHER; note = guanosine-3'-phosphate
  modified_base 10: mod_base = OTHER; note = cytidine-3'-phosphate
  modified_base 11: mod_base = OTHER; note = cytidine-3'-phosphate
  modified_base 12: mod_base = OTHER; note = uridine-3'-phosphate
  modified_base 13: mod_base = OTHER; note = guanosine-3'-phosphate
  modified_base 14: mod_base = OTHER; note = cytidine-3'-phosphate
  modified_base 15: mod_base = OTHER; note = uridine-3'-phosphate
  modified_base 16: mod_base = OTHER; note = cytidine-3'-phosphate
  modified_base 17: mod_base = OTHER; note = uridine-3'-phosphate
  modified_base 18: mod_base = OTHER; note = cytidine-3'-phosphate
  modified_base 19: mod_base = OTHER; note = uridine-3'-phosphate
  misc_feature 1..19: note = RNA
  misc_feature 20..21: note = DNA
accacagggcctgctctcttt

SEQ ID NO: 1335 - DNA, 21 bp, synthetic construct
  source 1..21: mol_type = other DNA
  modified_base 1: mod_base = OTHER; note = adenosine-3'-phosphate
  modified_base 2: mod_base = OTHER; note = cytidine-3'-phosphate
  modified_base 3: mod_base = OTHER; note = cytidine-3'-phosphate
  modified_base 4: mod_base = OTHER; note = uridine-3'-phosphate
  modified_base 5: mod_base = OTHER; note = cytidine-3'-phosphate
  modified_base 6: mod_base = OTHER; note = cytidine-3'-phosphate
  modified_base 7: mod_base = OTHER; note = uridine-3'-phosphate
  modified_base 8: mod_base = OTHER; note = guanosine-3'-phosphate
  modified_base 9: mod_base = OTHER; note = cytidine-3'-phosphate
  modified_base 10: mod_base = OTHER; note = cytidine-3'-phosphate
  modified_base 11: mod_base = OTHER; note = adenosine-3'-phosphate
  modified_base 12: mod_base = OTHER; note = cytidine-3'-phosphate
  modified_base 13: mod_base = OTHER; note = cytidine-3'-phosphate
  modified_base 14: mod_base = OTHER; note = adenosine-3'-phosphate
  modified_base 15: mod_base = OTHER; note = cytidine-3'-phosphate
  modified_base 16: mod_base = OTHER; note = adenosine-3'-phosphate
  modified_base 17: mod_base = OTHER; note = guanosine-3'-phosphate
  modified_base 18: mod_base = OTHER; note = guanosine-3'-phosphate
  modified_base 19: mod_base = OTHER; note = guanosine-3'-phosphate
  misc_feature 1..19: note = RNA
  misc_feature 20..21: note = DNA
acctcctgccaccacagggtt

SEQ ID NO: 1336 - DNA, 21 bp, synthetic construct
  source 1..21: mol_type = other DNA
  modified_base 1: mod_base = OTHER; note = guanosine-3'-phosphate
  modified_base 2: mod_base = OTHER; note = adenosine-3'-phosphate
  modified_base 3: mod_base = OTHER; note = guanosine-3'-phosphate
  modified_base 4: mod_base = OTHER; note = adenosine-3'-phosphate
  modified_base 5: mod_base = OTHER; note = cytidine-3'-phosphate
  modified_base 6: mod_base = OTHER; note = adenosine-3'-phosphate
  modified_base 7: mod_base = OTHER; note = adenosine-3'-phosphate
  modified_base 8: mod_base = OTHER; note = guanosine-3'-phosphate
  modified_base 9: mod_base = OTHER; note = adenosine-3'-phosphate
  modified_base 10: mod_base = OTHER; note = uridine-3'-phosphate
  modified_base 11: mod_base = OTHER; note = guanosine-3'-phosphate
  modified_base 12: mod_base = OTHER; note = cytidine-3'-phosphate
  modified_base 13: mod_base = OTHER; note = cytidine-3'-phosphate
  modified_base 14: mod_base = OTHER; note = adenosine-3'-phosphate
  modified_base 15: mod_base = OTHER; note = cytidine-3'-phosphate
  modified_base 16: mod_base = OTHER; note = cytidine-3'-phosphate
  modified_base 17: mod_base = OTHER; note = uridine-3'-phosphate
  modified_base 18: mod_base = OTHER; note = cytidine-3'-phosphate
  modified_base 19: mod_base = OTHER; note = cytidine-3'-phosphate
  misc_feature 1..19: note = RNA
  misc_feature 20..21: note = DNA
gagacaagatgccacctcctt

SEQ ID NO: 1337 - DNA, 21 bp, synthetic construct
  source 1..21: mol_type = other DNA
  modified_base 1: mod_base = OTHER; note = uridine-3'-phosphate
  modified_base 2: mod_base = OTHER; note = cytidine-3'-phosphate
  modified_base 3: mod_base = OTHER; note = adenosine-3'-phosphate
  modified_base 4: mod_base = OTHER; note = guanosine-3'-phosphate
  modified_base 5: mod_base = OTHER; note = guanosine-3'-phosphate
  modified_base 6: mod_base = OTHER; note = guanosine-3'-phosphate
  modified_base 7: mod_base = OTHER; note = adenosine-3'-phosphate
  modified_base 8: mod_base = OTHER; note = cytidine-3'-phosphate
  modified_base 9: mod_base = OTHER; note = guanosine-3'-phosphate
  modified_base 10: mod_base = OTHER; note = adenosine-3'-phosphate
  modified_base 11: mod_base = OTHER; note = guanosine-3'-phosphate
  modified_base 12: mod_base = OTHER; note = adenosine-3'-phosphate
  modified_base 13: mod_base = OTHER; note = cytidine-3'-phosphate
  modified_base 14: mod_base = OTHER; note = adenosine-3'-phosphate
  modified_base 15: mod_base = OTHER; note = adenosine-3'-phosphate
  modified_base 16: mod_base = OTHER; note = guanosine-3'-phosphate
  modified_base 17: mod_base = OTHER; note = adenosine-3'-phosphate
  modified_base 18: mod_base = OTHER; note = uridine-3'-phosphate
  modified_base 19: mod_base = OTHER; note = guanosine-3'-phosphate
  misc_feature 1..19: note = RNA
  misc_feature 20..21: note = DNA
tcagggacgagacaagatgtt

SEQ ID NO: 1338 - DNA, 21 bp, synthetic construct
  source 1..21: mol_type = other DNA
  modified_base 1: mod_base = OTHER; note = adenosine-3'-phosphate
  modified_base 2: mod_base = OTHER; note = cytidine-3'-phosphate
  modified_base 3: mod_base = OTHER; note = uridine-3'-phosphate
  modified_base 4: mod_base = OTHER; note = guanosine-3'-phosphate
  modified_base 5: mod_base = OTHER; note = guanosine-3'-phosphate
  modified_base 6: mod_base = OTHER; note = adenosine-3'-phosphate
  modified_base 7: mod_base = OTHER; note = guanosine-3'-phosphate
  modified_base 8: mod_base = OTHER; note = cytidine-3'-phosphate
  modified_base 9: mod_base = OTHER; note = adenosine-3'-phosphate
  modified_base 10: mod_base = OTHER; note = guanosine-3'-phosphate
  modified_base 11: mod_base = OTHER; note = adenosine-3'-phosphate
  modified_base 12: mod_base = OTHER; note = cytidine-3'-phosphate
  modified_base 13: mod_base = OTHER; note = adenosine-3'-phosphate
  modified_base 14: mod_base = OTHER; note = uridine-3'-phosphate
  modified_base 15: mod_base = OTHER; note = cytidine-3'-phosphate
  modified_base 16: mod_base = OTHER; note = adenosine-3'-phosphate
  modified_base 17: mod_base = OTHER; note = guanosine-3'-phosphate
  modified_base 18: mod_base = OTHER; note = guanosine-3'-phosphate
  modified_base 19: mod_base = OTHER; note = guanosine-3'-phosphate
  misc_feature 1..19: note = RNA
  misc_feature 20..21: note = DNA
actggagcagacatcagggtt

SEQ ID NO: 1339 - DNA, 21 bp, synthetic construct
  source 1..21: mol_type = other DNA
  modified_base 1: mod_base = OTHER; note = cytidine-3'-phosphate
  modified_base 2: mod_base = OTHER; note = cytidine-3'-phosphate
  modified_base 3: mod_base = OTHER; note = uridine-3'-phosphate
  modified_base 4: mod_base = OTHER; note = guanosine-3'-phosphate
  modified_base 5: mod_base = OTHER; note = cytidine-3'-phosphate
  modified_base 6: mod_base = OTHER; note = cytidine-3'-phosphate
  modified_base 7: mod_base = OTHER; note = adenosine-3'-phosphate
  modified_base 8: mod_base = OTHER; note = uridine-3'-phosphate
  modified_base 9: mod_base = OTHER; note = cytidine-3'-phosphate
  modified_base 10: mod_base = OTHER; note = adenosine-3'-phosphate
  modified_base 11: mod_base = OTHER; note = cytidine-3'-phosphate
  modified_base 12: mod_base = OTHER; note = uridine-3'-phosphate
  modified_base 13: mod_base = OTHER; note = guanosine-3'-phosphate
  modified_base 14: mod_base = OTHER; note = guanosine-3'-phosphate
  modified_base 15: mod_base = OTHER; note = adenosine-3'-phosphate
  modified_base 16: mod_base = OTHER; note = guanosine-3'-phosphate
  modified_base 17: mod_base = OTHER; note = cytidine-3'-phosphate
  modified_base 18: mod_base = OTHER; note = adenosine-3'-phosphate
  modified_base 19: mod_base = OTHER; note = guanosine-3'-phosphate
  misc_feature 1..19: note = RNA
  misc_feature 20..21: note = DNA
cctgccatcactggagcagtt

SEQ ID NO: 1340 - DNA, 21 bp, synthetic construct
  source 1..21: mol_type = other DNA
  modified_base 1: mod_base = OTHER; note = uridine-3'-phosphate
  modified_base 2: mod_base = OTHER; note = uridine-3'-phosphate
  modified_base 3: mod_base = OTHER; note = cytidine-3'-phosphate
  modified_base 4: mod_base = OTHER; note = uridine-3'-phosphate
  modified_base 5: mod_base = OTHER; note = cytidine-3'-phosphate
  modified_base 6: mod_base = OTHER; note = cytidine-3'-phosphate
  modified_base 7: mod_base = OTHER; note = adenosine-3'-phosphate
  modified_base 8: mod_base = OTHER; note = uridine-3'-phosphate
  modified_base 9: mod_base = OTHER; note = cytidine-3'-phosphate
  modified_base 10: mod_base = OTHER; note = cytidine-3'-phosphate
  modified_base 11: mod_base = OTHER; note = uridine-3'-phosphate
  modified_base 12: mod_base = OTHER; note = cytidine-3'-phosphate
  modified_base 13: mod_base = OTHER; note = cytidine-3'-phosphate
  modified_base 14: mod_base = OTHER; note = uridine-3'-phosphate
  modified_base 15: mod_base = OTHER; note = guanosine-3'-phosphate
  modified_base 16: mod_base = OTHER; note = cytidine-3'-phosphate
  modified_base 17: mod_base = OTHER; note = cytidine-3'-phosphate
  modified_base 18: mod_base = OTHER; note = adenosine-3'-phosphate
  modified_base 19: mod_base = OTHER; note = uridine-3'-phosphate
  misc_feature 1..19: note = RNA
  misc_feature 20..21: note = DNA
ttctccatcctcctgccattt

SEQ ID NO: 1341 - DNA, 21 bp, synthetic construct
  source 1..21: mol_type = other DNA
  modified_base 1: mod_base = OTHER; note = uridine-3'-phosphate
  modified_base 2: mod_base = OTHER; note = guanosine-3'-phosphate
  modified_base 3: mod_base = OTHER; note = cytidine-3'-phosphate
  modified_base 4: mod_base = OTHER; note = uridine-3'-phosphate
  modified_base 5: mod_base = OTHER; note = guanosine-3'-phosphate
  modified_base 6: mod_base = OTHER; note = guanosine-3'-phosphate
  modified_base 7: mod_base = OTHER; note = cytidine-3'-phosphate
  modified_base 8: mod_base = OTHER; note = adenosine-3'-phosphate
  modified_base 9: mod_base = OTHER; note = cytidine-3'-phosphate
  modified_base 10: mod_base = OTHER; note = uridine-3'-phosphate
  modified_base 11: mod_base = OTHER; note = uridine-3'-phosphate
  modified_base 12: mod_base = OTHER; note = cytidine-3'-phosphate
  modified_base 13: mod_base = OTHER; note = uridine-3'-phosphate
  modified_base 14: mod_base = OTHER; note = cytidine-3'-phosphate
  modified_base 15: mod_base = OTHER; note = cytidine-3'-phosphate
  modified_base 16: mod_base = OTHER; note = adenosine-3'-phosphate
  modified_base 17: mod_base = OTHER; note = uridine-3'-phosphate
  modified_base 18: mod_base = OTHER; note = cytidine-3'-phosphate
  modified_base 19: mod_base = OTHER; note = cytidine-3'-phosphate
  misc_feature 1..19: note = RNA
  misc_feature 20..21: note = DNA
tgctggcacttctccatcctt

SEQ ID NO: 1342 - DNA, 21 bp, synthetic construct
  source 1..21: mol_type = other DNA
  modified_base 1: mod_base = OTHER; note = uridine-3'-phosphate
  modified_base 2: mod_base = OTHER; note = guanosine-3'-phosphate
  modified_base 3: mod_base = OTHER; note = adenosine-3'-phosphate
  modified_base 4: mod_base = OTHER; note = cytidine-3'-phosphate
  modified_base 5: mod_base = OTHER; note = cytidine-3'-phosphate
  modified_base 6: mod_base = OTHER; note = cytidine-3'-phosphate
  modified_base 7: mod_base = OTHER; note = cytidine-3'-phosphate
  modified_base 8: mod_base = OTHER; note = cytidine-3'-phosphate
  modified_base 9: mod_base = OTHER; note = adenosine-3'-phosphate
  modified_base 10: mod_base = OTHER; note = guanosine-3'-phosphate
  modified_base 11: mod_base = OTHER; note = cytidine-3'-phosphate
  modified_base 12: mod_base = OTHER; note = uridine-3'-phosphate
  modified_base 13: mod_base = OTHER; note = guanosine-3'-phosphate
  modified_base 14: mod_base = OTHER; note = cytidine-3'-phosphate
  modified_base 15: mod_base = OTHER; note = uridine-3'-phosphate
  modified_base 16: mod_base = OTHER; note = guanosine-3'-phosphate
  modified_base 17: mod_base = OTHER; note = guanosine-3'-phosphate
  modified_base 18: mod_base = OTHER; note = cytidine-3'-phosphate
  modified_base 19: mod_base = OTHER; note = adenosine-3'-phosphate
  misc_feature 1..19: note = RNA
  misc_feature 20..21: note = DNA
tgacccccagctgctggcatt

SEQ ID NO: 1343 - DNA, 21 bp, synthetic construct
  source 1..21: mol_type = other DNA
  modified_base 1: mod_base = OTHER; note = guanosine-3'-phosphate
  modified_base 2: mod_base = OTHER; note = adenosine-3'-phosphate
  modified_base 3: mod_base = OTHER; note = cytidine-3'-phosphate
  modified_base 4: mod_base = OTHER; note = guanosine-3'-phosphate
  modified_base 5: mod_base = OTHER; note = uridine-3'-phosphate
  modified_base 6: mod_base = OTHER; note = cytidine-3'-phosphate
  modified_base 7: mod_base = OTHER; note = uridine-3'-phosphate
  modified_base 8: mod_base = OTHER; note = uridine-3'-phosphate
  modified_base 9: mod_base = OTHER; note = guanosine-3'-phosphate
  modified_base 10: mod_base = OTHER; note = adenosine-3'-phosphate
  modified_base 11: mod_base = OTHER; note = cytidine-3'-phosphate
  modified_base 12: mod_base = OTHER; note = cytidine-3'-phosphate
  modified_base 13: mod_base = OTHER; note = cytidine-3'-phosphate
  modified_base 14: mod_base = OTHER; note = cytidine-3'-phosphate
  modified_base 15: mod_base = OTHER; note = cytidine-3'-phosphate
  modified_base 16: mod_base = OTHER; note = adenosine-3'-phosphate
  modified_base 17: mod_base = OTHER; note = guanosine-3'-phosphate
  modified_base 18: mod_base = OTHER; note = cytidine-3'-phosphate
  modified_base 19: mod_base = OTHER; note = uridine-3'-phosphate
  misc_feature 1..19: note = RNA
  misc_feature 20..21: note = DNA
gacgtcttgacccccagcttt

SEQ ID NO: 1344 - DNA, 21 bp, synthetic construct
  source 1..21: mol_type = other DNA
  modified_base 1: mod_base = OTHER; note = uridine-3'-phosphate
  modified_base 2: mod_base = OTHER; note = cytidine-3'-phosphate
  modified_base 3: mod_base = OTHER; note = cytidine-3'-phosphate
  modified_base 4: mod_base = OTHER; note = uridine-3'-phosphate
  modified_base 5: mod_base = OTHER; note = cytidine-3'-phosphate
  modified_base 6: mod_base = OTHER; note = adenosine-3'-phosphate
  modified_base 7: mod_base = OTHER; note = guanosine-3'-phosphate
  modified_base 8: mod_base = OTHER; note = guanosine-3'-phosphate
  modified_base 9: mod_base = OTHER; note = guanosine-3'-phosphate
  modified_base 10: mod_base = OTHER; note = guanosine-3'-phosphate
  modified_base 11: mod_base = OTHER; note = adenosine-3'-phosphate
  modified_base 12: mod_base = OTHER; note = cytidine-3'-phosphate
  modified_base 13: mod_base = OTHER; note = guanosine-3'-phosphate
  modified_base 14: mod_base = OTHER; note = uridine-3'-phosphate
  modified_base 15: mod_base = OTHER; note = cytidine-3'-phosphate
  modified_base 16: mod_base = OTHER; note = uridine-3'-phosphate
  modified_base 17: mod_base = OTHER; note = uridine-3'-phosphate
  modified_base 18: mod_base = OTHER; note = guanosine-3'-phosphate
  modified_base 19: mod_base = OTHER; note = adenosine-3'-phosphate
  misc_feature 1..19: note = RNA
  misc_feature 20..21: note = DNA
tcctcaggggacgtcttgatt

SEQ ID NO: 1345 - DNA, 21 bp, synthetic construct
  source 1..21: mol_type = other DNA
  modified_base 1: mod_base = OTHER; note = uridine-3'-phosphate
  modified_base 2: mod_base = OTHER; note = guanosine-3'-phosphate
  modified_base 3: mod_base = OTHER; note = guanosine-3'-phosphate
  modified_base 4: mod_base = OTHER; note = guanosine-3'-phosphate
  modified_base 5: mod_base = OTHER; note = cytidine-3'-phosphate
  modified_base 6: mod_base = OTHER; note = cytidine-3'-phosphate
  modified_base 7: mod_base = OTHER; note = uridine-3'-phosphate
  modified_base 8: mod_base = OTHER; note = guanosine-3'-phosphate
  modified_base 9: mod_base = OTHER; note = guanosine-3'-phosphate
  modified_base 10: mod_base = OTHER; note = guanosine-3'-phosphate
  modified_base 11: mod_base = OTHER; note = uridine-3'-phosphate
  modified_base 12: mod_base = OTHER; note = cytidine-3'-phosphate
  modified_base 13: mod_base = OTHER; note = cytidine-3'-phosphate
  modified_base 14: mod_base = OTHER; note = uridine-3'-phosphate
  modified_base 15: mod_base = OTHER; note = cytidine-3'-phosphate
  modified_base 16: mod_base = OTHER; note = adenosine-3'-phosphate
  modified_base 17: mod_base = OTHER; note = guanosine-3'-phosphate
  modified_base 18: mod_base = OTHER; note = guanosine-3'-phosphate
  modified_base 19: mod_base = OTHER; note = guanosine-3'-phosphate
  misc_feature 1..19: note = RNA
  misc_feature 20..21: note = DNA
tgggcctgggtcctcagggtt

SEQ ID NO: 1346 - DNA, 21 bp, synthetic construct
  source 1..21: mol_type = other DNA
  modified_base 1: mod_base = OTHER; note = adenosine-3'-phosphate
  modified_base 2: mod_base = OTHER; note = guanosine-3'-phosphate
  modified_base 3: mod_base = OTHER; note = adenosine-3'-phosphate
  modified_base 4: mod_base = OTHER; note = adenosine-3'-phosphate
  modified_base 5: mod_base = OTHER; note = guanosine-3'-phosphate
  modified_base 6: mod_base = OTHER; note = guanosine-3'-phosphate
  modified_base 7: mod_base = OTHER; note = guanosine-3'-phosphate
  modified_base 8: mod_base = OTHER; note = cytidine-3'-phosphate
  modified_base 9: mod_base = OTHER; note = uridine-3'-phosphate
  modified_base 10: mod_base = OTHER; note = guanosine-3'-phosphate
  modified_base 11: mod_base = OTHER; note = guanosine-3'-phosphate
  modified_base 12: mod_base = OTHER; note = guanosine-3'-phosphate
  modified_base 13: mod_base = OTHER; note = uridine-3'-phosphate
  modified_base 14: mod_base = OTHER; note = guanosine-3'-phosphate
  modified_base 15: mod_base = OTHER; note = uridine-3'-phosphate
  modified_base 16: mod_base = OTHER; note = guanosine-3'-phosphate
  modified_base 17: mod_base = OTHER; note = guanosine-3'-phosphate
  modified_base 18: mod_base = OTHER; note = guanosine-3'-phosphate
  modified_base 19: mod_base = OTHER; note = cytidine-3'-phosphate
  misc_feature 1..19: note = RNA
  misc_feature 20..21: note = DNA
agaagggctgggtgtgggctt

SEQ ID NO: 1347 - DNA, 21 bp, synthetic construct
  source 1..21: mol_type = other DNA
  modified_base 1: mod_base = OTHER; note = adenosine-3'-phosphate
  modified_base 2: mod_base = OTHER; note = uridine-3'-phosphate
  modified_base 3: mod_base = OTHER; note = uridine-3'-phosphate
  modified_base 4: mod_base = OTHER; note = guanosine-3'-phosphate
  modified_base 5: mod_base = OTHER; note = guanosine-3'-phosphate
  modified_base 6: mod_base = OTHER; note = guanosine-3'-phosphate
  modified_base 7: mod_base = OTHER; note = adenosine-3'-phosphate
  modified_base 8: mod_base = OTHER; note = guanosine-3'-phosphate
  modified_base 9: mod_base = OTHER; note = guanosine-3'-phosphate
  modified_base 10: mod_base = OTHER; note = cytidine-3'-phosphate
  modified_base 11: mod_base = OTHER; note = adenosine-3'-phosphate
  modified_base 12: mod_base = OTHER; note = guanosine-3'-phosphate
  modified_base 13: mod_base = OTHER; note = adenosine-3'-phosphate
  modified_base 14: mod_base = OTHER; note = adenosine-3'-phosphate
  modified_base 15: mod_base = OTHER; note = guanosine-3'-phosphate
  modified_base 16: mod_base = OTHER; note = guanosine-3'-phosphate
  modified_base 17: mod_base = OTHER; note = guanosine-3'-phosphate
  modified_base 18: mod_base = OTHER; note = cytidine-3'-phosphate
  modified_base 19: mod_base = OTHER; note = uridine-3'-phosphate
  misc_feature 1..19: note = RNA
  misc_feature 20..21: note = DNA
attgggaggcagaagggcttt

SEQ ID NO: 1348 - DNA, 21 bp, synthetic construct
  source 1..21: mol_type = other DNA
  modified_base 1: mod_base = OTHER; note = adenosine-3'-phosphate
  modified_base 2: mod_base = OTHER; note = guanosine-3'-phosphate
  modified_base 3: mod_base = OTHER; note = guanosine-3'-phosphate
  modified_base 4: mod_base = OTHER; note = adenosine-3'-phosphate
  modified_base 5: mod_base = OTHER; note = guanosine-3'-phosphate
  modified_base 6: mod_base = OTHER; note = adenosine-3'-phosphate
  modified_base 7: mod_base = OTHER; note = guanosine-3'-phosphate
  modified_base 8: mod_base = OTHER; note = adenosine-3'-phosphate
  modified_base 9: mod_base = OTHER; note = guanosine-3'-phosphate
  modified_base 10: mod_base = OTHER; note = adenosine-3'-phosphate
  modified_base 11: mod_base = OTHER; note = adenosine-3'-phosphate
  modified_base 12: mod_base = OTHER; note = uridine-3'-phosphate
  modified_base 13: mod_base = OTHER; note = uridine-3'-phosphate
  modified_base 14: mod_base = OTHER; note = guanosine-3'-phosphate
  modified_base 15: mod_base = OTHER; note = guanosine-3'-phosphate
  modified_base 16: mod_base = OTHER; note = guanosine-3'-phosphate
  modified_base 17: mod_base = OTHER; note = adenosine-3'-phosphate
  modified_base 18: mod_base = OTHER; note = guanosine-3'-phosphate
  modified_base 19: mod_base = OTHER; note = guanosine-3'-phosphate
  misc_feature 1..19: note = RNA
  misc_feature 20..21: note = DNA
aggagagagaattgggaggtt

SEQ ID NO: 1349 - DNA, 21 bp, synthetic construct
  source 1..21: mol_type = other DNA
  modified_base 1: mod_base = OTHER; note = adenosine-3'-phosphate
  modified_base 2: mod_base = OTHER; note = adenosine-3'-phosphate
  modified_base 3: mod_base = OTHER; note = guanosine-3'-phosphate
  modified_base 4: mod_base = OTHER; note = guanosine-3'-phosphate
  modified_base 5: mod_base = OTHER; note = guanosine-3'-phosphate
  modified_base 6: mod_base = OTHER; note = guanosine-3'-phosphate
  modified_base 7: mod_base = OTHER; note = adenosine-3'-phosphate
  modified_base 8: mod_base = OTHER; note = cytidine-3'-phosphate
  modified_base 9: mod_base = OTHER; note = guanosine-3'-phosphate
  modified_base 10: mod_base = OTHER; note = guanosine-3'-phosphate
  modified_base 11: mod_base = OTHER; note = adenosine-3'-phosphate
  modified_base 12: mod_base = OTHER; note = guanosine-3'-phosphate
  modified_base 13: mod_base = OTHER; note = guanosine-3'-phosphate
  modified_base 14: mod_base = OTHER; note = adenosine-3'-phosphate
  modified_base 15: mod_base = OTHER; note = guanosine-3'-phosphate
  modified_base 16: mod_base = OTHER; note = adenosine-3'-phosphate
  modified_base 17: mod_base = OTHER; note = guanosine-3'-phosphate
  modified_base 18: mod_base = OTHER; note = adenosine-3'-phosphate
  modified_base 19: mod_base = OTHER; note = guanosine-3'-phosphate
  misc_feature 1..19: note = RNA
  misc_feature 20..21: note = DNA
aaggggacggaggagagagtt

SEQ ID NO: 1350 - DNA, 21 bp, synthetic construct
  source 1..21: mol_type = other DNA
  modified_base 1: mod_base = OTHER; note = adenosine-3'-phosphate
  modified_base 2: mod_base = OTHER; note = guanosine-3'-phosphate
  modified_base 3: mod_base = OTHER; note = uridine-3'-phosphate
  modified_base 4: mod_base = OTHER; note = guanosine-3'-phosphate
  modified_base 5: mod_base = OTHER; note = guanosine-3'-phosphate
  modified_base 6: mod_base = OTHER; note = adenosine-3'-phosphate
  modified_base 7: mod_base = OTHER; note = guanosine-3'-phosphate
  modified_base 8: mod_base = OTHER; note = guanosine-3'-phosphate
  modified_base 9: mod_base = OTHER; note = adenosine-3'-phosphate
  modified_base 10: mod_base = OTHER; note = adenosine-3'-phosphate
  modified_base 11: mod_base = OTHER; note = guanosine-3'-phosphate
  modified_base 12: mod_base = OTHER; note = guanosine-3'-phosphate
  modified_base 13: mod_base = OTHER; note = guanosine-3'-phosphate
  modified_base 14: mod_base = OTHER; note = guanosine-3'-phosphate
  modified_base 15: mod_base = OTHER; note = adenosine-3'-phosphate
  modified_base 16: mod_base = OTHER; note = cytidine-3'-phosphate
  modified_base 17: mod_base = OTHER; note = guanosine-3'-phosphate
  modified_base 18: mod_base = OTHER; note = guanosine-3'-phosphate
  modified_base 19: mod_base = OTHER; note = adenosine-3'-phosphate
  misc_feature 1..19: note = RNA
  misc_feature 20..21: note = DNA
agtggaggaaggggacggatt

SEQ ID NO: 1351 - DNA, 21 bp, synthetic construct
  source 1..21: mol_type = other DNA
  modified_base 1: mod_base = OTHER; note = uridine-3'-phosphate
  modified_base 2: mod_base = OTHER; note = adenosine-3'-phosphate
  modified_base 3: mod_base = OTHER; note = guanosine-3'-phosphate
  modified_base 4: mod_base = OTHER; note = guanosine-3'-phosphate
  modified_base 5: mod_base = OTHER; note = cytidine-3'-phosphate
  modified_base 6: mod_base = OTHER; note = adenosine-3'-phosphate
  modified_base 7: mod_base = OTHER; note = guanosine-3'-phosphate
  modified_base 8: mod_base = OTHER; note = cytidine-3'-phosphate
  modified_base 9: mod_base = OTHER; note = adenosine-3'-phosphate
  modified_base 10: mod_base = OTHER; note = guanosine-3'-phosphate
  modified_base 11: mod_base = OTHER; note = uridine-3'-phosphate
  modified_base 12: mod_base = OTHER; note = guanosine-3'-phosphate
  modified_base 13: mod_base = OTHER; note = guanosine-3'-phosphate
  modified_base 14: mod_base = OTHER; note = adenosine-3'-phosphate
  modified_base 15: mod_base = OTHER; note = guanosine-3'-phosphate
  modified_base 16: mod_base = OTHER; note = guanosine-3'-phosphate
  modified_base 17: mod_base = OTHER; note = adenosine-3'-phosphate
  modified_base 18: mod_base = OTHER; note = adenosine-3'-phosphate
  modified_base 19: mod_base = OTHER; note = guanosine-3'-phosphate
  misc_feature 1..19: note = RNA
  misc_feature 20..21: note = DNA
taggcagcagtggaggaagtt

SEQ ID NO: 1352 - DNA, 21 bp, synthetic construct
  source 1..21: mol_type = other DNA
  modified_base 1: mod_base = OTHER; note = adenosine-3'-phosphate
  modified_base 2: mod_base = OTHER; note = cytidine-3'-phosphate
  modified_base 3: mod_base = OTHER; note = uridine-3'-phosphate
  modified_base 4: mod_base = OTHER; note = guanosine-3'-phosphate
  modified_base 5: mod_base = OTHER; note = cytidine-3'-phosphate
  modified_base 6: mod_base = OTHER; note = cytidine-3'-phosphate
  modified_base 7: mod_base = OTHER; note = uridine-3'-phosphate
  modified_base 8: mod_base = OTHER; note = uridine-3'-phosphate
  modified_base 9: mod_base = OTHER; note = guanosine-3'-phosphate
  modified_base 10: mod_base = OTHER; note = cytidine-3'-phosphate
  modified_base 11: mod_base = OTHER; note = adenosine-3'-phosphate
  modified_base 12: mod_base = OTHER; note = uridine-3'-phosphate
  modified_base 13: mod_base = OTHER; note = uridine-3'-phosphate
  modified_base 14: mod_base = OTHER; note = adenosine-3'-phosphate
  modified_base 15: mod_base = OTHER; note = guanosine-3'-phosphate
  modified_base 16: mod_base = OTHER; note = guanosine-3'-phosphate
  modified_base 17: mod_base = OTHER; note = cytidine-3'-phosphate
  modified_base 18: mod_base = OTHER; note = adenosine-3'-phosphate
  modified_base 19: mod_base = OTHER; note = guanosine-3'-phosphate
  misc_feature 1..19: note = RNA
  misc_feature 20..21: note = DNA
actgccttgcattaggcagtt

SEQ ID NO: 1353 - DNA, 21 bp, synthetic construct
  source 1..21: mol_type = other DNA
  modified_base 1: mod_base = OTHER; note = uridine-3'-phosphate
  modified_base 2: mod_base = OTHER; note = guanosine-3'-phosphate
  modified_base 3: mod_base = OTHER; note = cytidine-3'-phosphate
  modified_base 4: mod_base = OTHER; note = uridine-3'-phosphate
  modified_base 5: mod_base = OTHER; note = guanosine-3'-phosphate
  modified_base 6: mod_base = OTHER; note = adenosine-3'-phosphate
  modified_base 7: mod_base = OTHER; note = guanosine-3'-phosphate
  modified_base 8: mod_base = OTHER; note = cytidine-3'-phosphate
  modified_base 9: mod_base = OTHER; note = cytidine-3'-phosphate
  modified_base 10: mod_base = OTHER; note = adenosine-3'-phosphate
  modified_base 11: mod_base = OTHER; note = cytidine-3'-phosphate
  modified_base 12: mod_base = OTHER; note = uridine-3'-phosphate
  modified_base 13: mod_base = OTHER; note = guanosine-3'-phosphate
  modified_base 14: mod_base = OTHER; note = cytidine-3'-phosphate
  modified_base 15: mod_base = OTHER; note = cytidine-3'-phosphate
  modified_base 16: mod_base = OTHER; note = uridine-3'-phosphate
  modified_base 17: mod_base = OTHER; note = uridine-3'-phosphate
  modified_base 18: mod_base = OTHER; note = guanosine-3'-phosphate
  modified_base 19: mod_base = OTHER; note = cytidine-3'-phosphate
  misc_feature 1..19: note = RNA
  misc_feature 20..21: note = DNA
tgctgagccactgccttgctt

SEQ ID NO: 1354 - DNA, 21 bp, synthetic construct
  source 1..21: mol_type = other DNA
  modified_base 1: mod_base = OTHER; note = cytidine-3'-phosphate
  modified_base 2: mod_base = OTHER; note = adenosine-3'-phosphate
  modified_base 3: mod_base = OTHER; note = uridine-3'-phosphate
  modified_base 4: mod_base = OTHER; note = uridine-3'-phosphate
  modified_base 5: mod_base = OTHER; note = cytidine-3'-phosphate
  modified_base 6: mod_base = OTHER; note = uridine-3'-phosphate
  modified_base 7: mod_base = OTHER; note = uridine-3'-phosphate
  modified_base 8: mod_base = OTHER; note = guanosine-3'-phosphate
  modified_base 9: mod_base = OTHER; note = cytidine-3'-phosphate
  modified_base 10: mod_base = OTHER; note = uridine-3'-phosphate
  modified_base 11: mod_base = OTHER; note = guanosine-3'-phosphate
  modified_base 12: mod_base = OTHER; note = cytidine-3'-phosphate
  modified_base 13: mod_base = OTHER; note = uridine-3'-phosphate
  modified_base 14: mod_base = OTHER; note = guanosine-3'-phosphate
  modified_base 15: mod_base = OTHER; note = adenosine-3'-phosphate
  modified_base 16: mod_base = OTHER; note = guanosine-3'-phosphate
  modified_base 17: mod_base = OTHER; note = cytidine-3'-phosphate
  modified_base 18: mod_base = OTHER; note = cytidine-3'-phosphate
  modified_base 19: mod_base = OTHER; note = adenosine-3'-phosphate
  misc_feature 1..19: note = RNA
  misc_feature 20..21: note = DNA
cattcttgctgctgagccatt

SEQ ID NO: 1355 - DNA, 21 bp, synthetic construct
  source 1..21: mol_type = other DNA
  modified_base 1: mod_base = OTHER; note = uridine-3'-phosphate
  modified_base 2: mod_base = OTHER; note = guanosine-3'-phosphate
  modified_base 3: mod_base = OTHER; note = uridine-3'-phosphate
  modified_base 4: mod_base = OTHER; note = adenosine-3'-phosphate
  modified_base 5: mod_base = OTHER; note = guanosine-3'-phosphate
  modified_base 6: mod_base = OTHER; note = adenosine-3'-phosphate
  modified_base 7: mod_base = OTHER; note = adenosine-3'-phosphate
  modified_base 8: mod_base = OTHER; note = cytidine-3'-phosphate
  modified_base 9: mod_base = OTHER; note = cytidine-3'-phosphate
  modified_base 10: mod_base = OTHER; note = adenosine-3'-phosphate
  modified_base 11: mod_base = OTHER; note = guanosine-3'-phosphate
  modified_base 12: mod_base = OTHER; note = cytidine-3'-phosphate
  modified_base 13: mod_base = OTHER; note = adenosine-3'-phosphate
  modified_base 14: mod_base = OTHER; note = uridine-3'-phosphate
  modified_base 15: mod_base = OTHER; note = uridine-3'-phosphate
  modified_base 16: mod_base = OTHER; note = cytidine-3'-phosphate
  modified_base 17: mod_base = OTHER; note = uridine-3'-phosphate
  modified_base 18: mod_base = OTHER; note = uridine-3'-phosphate
  modified_base 19: mod_base = OTHER; note = guanosine-3'-phosphate
  misc_feature 1..19: note = RNA
  misc_feature 20..21: note = DNA
tgtagaaccagcattcttgtt

SEQ ID NO: 1356 - DNA, 21 bp, synthetic construct
  source 1..21: mol_type = other DNA
  modified_base 1: mod_base = OTHER; note = uridine-3'-phosphate
  modified_base 2: mod_base = OTHER; note = cytidine-3'-phosphate
  modified_base 3: mod_base = OTHER; note = cytidine-3'-phosphate
  modified_base 4: mod_base = OTHER; note = uridine-3'-phosphate
  modified_base 5: mod_base = OTHER; note = cytidine-3'-phosphate
  modified_base 6: mod_base = OTHER; note = guanosine-3'-phosphate
  modified_base 7: mod_base = OTHER; note = guanosine-3'-phosphate
  modified_base 8: mod_base = OTHER; note = guanosine-3'-phosphate
  modified_base 9: mod_base = OTHER; note = adenosine-3'-phosphate
  modified_base 10: mod_base = OTHER; note = uridine-3'-phosphate
  modified_base 11: mod_base = OTHER; note = guanosine-3'-phosphate
  modified_base 12: mod_base = OTHER; note = uridine-3'-phosphate
  modified_base 13: mod_base = OTHER; note = adenosine-3'-phosphate
  modified_base 14: mod_base = OTHER; note = guanosine-3'-phosphate
  modified_base 15: mod_base = OTHER; note = adenosine-3'-phosphate
  modified_base 16: mod_base = OTHER; note = adenosine-3'-phosphate
  modified_base 17: mod_base = OTHER; note = cytidine-3'-phosphate
  modified_base 18: mod_base = OTHER; note = cytidine-3'-phosphate
  modified_base 19: mod_base = OTHER; note = adenosine-3'-phosphate
  misc_feature 1..19: note = RNA
  misc_feature 20..21: note = DNA
tcctcgggatgtagaaccatt

SEQ ID NO: 1357 - DNA, 21 bp, synthetic construct
  source 1..21: mol_type = other DNA
  modified_base 1: mod_base = OTHER; note = adenosine-3'-phosphate
  modified_base 2: mod_base = OTHER; note = cytidine-3'-phosphate
  modified_base 3: mod_base = OTHER; note = cytidine-3'-phosphate
  modified_base 4: mod_base = OTHER; note = uridine-3'-phosphate
  modified_base 5: mod_base = OTHER; note = cytidine-3'-phosphate
  modified_base 6: mod_base = OTHER; note = adenosine-3'-phosphate
  modified_base 7: mod_base = OTHER; note = guanosine-3'-phosphate
  modified_base 8: mod_base = OTHER; note = adenosine-3'-phosphate
  modified_base 9: mod_base = OTHER; note = cytidine-3'-phosphate
  modified_base 10: mod_base = OTHER; note = adenosine-3'-phosphate
  modified_base 11: mod_base = OTHER; note = cytidine-3'-phosphate
  modified_base 12: mod_base = OTHER; note = uridine-3'-phosphate
  modified_base 13: mod_base = OTHER; note = cytidine-3'-phosphate
  modified_base 14: mod_base = OTHER; note = cytidine-3'-phosphate
  modified_base 15: mod_base = OTHER; note = uridine-3'-phosphate
  modified_base 16: mod_base = OTHER; note = cytidine-3'-phosphate
  modified_base 17: mod_base = OTHER; note = guanosine-3'-phosphate
  modified_base 18: mod_base = OTHER; note = guanosine-3'-phosphate
  modified_base 19: mod_base = OTHER; note = guanosine-3'-phosphate
  misc_feature 1..19: note = RNA
  misc_feature 20..21: note = DNA
acctcagacactcctcgggtt

SEQ ID NO: 1358 - DNA, 21 bp, synthetic construct
  source 1..21: mol_type = other DNA
  modified_base 1: mod_base = OTHER; note = adenosine-3'-phosphate
  modified_base 2: mod_base = OTHER; note = guanosine-3'-phosphate
  modified_base 3: mod_base = OTHER; note = uridine-3'-phosphate
  modified_base 4: mod_base = OTHER; note = guanosine-3'-phosphate
  modified_base 5: mod_base = OTHER; note = guanosine-3'-phosphate
  modified_base 6: mod_base = OTHER; note = guanosine-3'-phosphate
  modified_base 7: mod_base = OTHER; note = guanosine-3'-phosphate
  modified_base 8: mod_base = OTHER; note = cytidine-3'-phosphate
  modified_base 9: mod_base = OTHER; note = guanosine-3'-phosphate
  modified_base 10: mod_base = OTHER; note = cytidine-3'-phosphate
  modified_base 11: mod_base = OTHER; note = adenosine-3'-phosphate
  modified_base 12: mod_base = OTHER; note = cytidine-3'-phosphate
  modified_base 13: mod_base = OTHER; note = cytidine-3'-phosphate
  modified_base 14: mod_base = OTHER; note = uridine-3'-phosphate
  modified_base 15: mod_base = OTHER; note = cytidine-3'-phosphate
  modified_base 16: mod_base = OTHER; note = adenosine-3'-phosphate
  modified_base 17: mod_base = OTHER; note = guanosine-3'-phosphate
  modified_base 18: mod_base = OTHER; note = adenosine-3'-phosphate
  modified_base 19: mod_base = OTHER; note = cytidine-3'-phosphate
  misc_feature 1..19: note = RNA
  misc_feature 20..21: note = DNA
agtggggcgcacctcagactt

SEQ ID NO: 1359 - DNA, 21 bp, synthetic construct
  source 1..21: mol_type = other DNA
  modified_base 1: mod_base = OTHER; note = cytidine-3'-phosphate
  modified_base 2: mod_base = OTHER; note = cytidine-3'-phosphate
  modified_base 3: mod_base = OTHER; note = uridine-3'-phosphate
  modified_base 4: mod_base = OTHER; note = cytidine-3'-phosphate
  modified_base 5: mod_base = OTHER; note = uridine-3'-phosphate
  modified_base 6: mod_base = OTHER; note = guanosine-3'-phosphate
  modified_base 7: mod_base = OTHER; note = uridine-3'-phosphate
  modified_base 8: mod_base = OTHER; note = adenosine-3'-phosphate
  modified_base 9: mod_base = OTHER; note = cytidine-3'-phosphate
  modified_base 10: mod_base = OTHER; note = adenosine-3'-phosphate
  modified_base 11: mod_base = OTHER; note = guanosine-3'-phosphate
  modified_base 12: mod_base = OTHER; note = adenosine-3'-phosphate
  modified_base 13: mod_base = OTHER; note = guanosine-3'-phosphate
  modified_base 14: mod_base = OTHER; note = uridine-3'-phosphate
  modified_base 15: mod_base = OTHER; note = guanosine-3'-phosphate
  modified_base 16: mod_base = OTHER; note = guanosine-3'-phosphate
  modified_base 17: mod_base = OTHER; note = guanosine-3'-phosphate
  modified_base 18: mod_base = OTHER; note = guanosine-3'-phosphate
  modified_base 19: mod_base = OTHER; note = cytidine-3'-phosphate
  misc_feature 1..19: note = RNA
  misc_feature 20..21: note = DNA
cctctgtacagagtggggctt

SEQ ID NO: 1360 - DNA, 21 bp, synthetic construct
  source 1..21: mol_type = other DNA
  modified_base 1: mod_base = OTHER; note = cytidine-3'-phosphate
  modified_base 2: mod_base = OTHER; note = cytidine-3'-phosphate
  modified_base 3: mod_base = OTHER; note = adenosine-3'-phosphate
  modified_base 4: mod_base = OTHER; note = adenosine-3'-phosphate
  modified_base 5: mod_base = OTHER; note = adenosine-3'-phosphate
  modified_base 6: mod_base = OTHER; note = cytidine-3'-phosphate
  modified_base 7: mod_base = OTHER; note = adenosine-3'-phosphate
  modified_base 8: mod_base = OTHER; note = guanosine-3'-phosphate
  modified_base 9: mod_base = OTHER; note = cytidine-3'-phosphate
  modified_base 10: mod_base = OTHER; note = cytidine-3'-phosphate
  modified_base 11: mod_base = OTHER; note = uridine-3'-phosphate
  modified_base 12: mod_base = OTHER; note = cytidine-3'-phosphate
  modified_base 13: mod_base = OTHER; note = uridine-3'-phosphate
  modified_base 14: mod_base = OTHER; note = guanosine-3'-phosphate
  modified_base 15: mod_base = OTHER; note = uridine-3'-phosphate
  modified_base 16: mod_base = OTHER; note = adenosine-3'-phosphate
  modified_base 17: mod_base = OTHER; note = cytidine-3'-phosphate
  modified_base 18: mod_base = OTHER; note = adenosine-3'-phosphate
  modified_base 19: mod_base = OTHER; note = guanosine-3'-phosphate
  misc_feature 1..19: note = RNA
  misc_feature 20..21: note = DNA
ccaaacagcctctgtacagtt

SEQ ID NO: 1361 - DNA, 21 bp, synthetic construct
  source 1..21: mol_type = other DNA
  modified_base 1: mod_base = OTHER; note = guanosine-3'-phosphate
  modified_base 2: mod_base = OTHER; note = guanosine-3'-phosphate
  modified_base 3: mod_base = OTHER; note = cytidine-3'-phosphate
  modified_base 4: mod_base = OTHER; note = adenosine-3'-phosphate
  modified_base 5: mod_base = OTHER; note = adenosine-3'-phosphate
  modified_base 6: mod_base = OTHER; note = guanosine-3'-phosphate
  modified_base 7: mod_base = OTHER; note = guanosine-3'-phosphate
  modified_base 8: mod_base = OTHER; note = cytidine-3'-phosphate
  modified_base 9: mod_base = OTHER; note = uridine-3'-phosphate
  modified_base 10: mod_base = OTHER; note = guanosine-3'-phosphate
  modified_base 11: mod_base = OTHER; note = cytidine-3'-phosphate
  modified_base 12: mod_base = OTHER; note = cytidine-3'-phosphate
  modified_base 13: mod_base = OTHER; note = cytidine-3'-phosphate
  modified_base 14: mod_base = OTHER; note = adenosine-3'-phosphate
  modified_base 15: mod_base = OTHER; note = adenosine-3'-phosphate
  modified_base 16: mod_base = OTHER; note = adenosine-3'-phosphate
  modified_base 17: mod_base = OTHER; note = cytidine-3'-phosphate
  modified_base 18: mod_base = OTHER; note = adenosine-3'-phosphate
  modified_base 19: mod_base = OTHER; note = guanosine-3'-phosphate
  misc_feature 1..19: note = RNA
  misc_feature 20..21: note = DNA
ggcaaggctgcccaaacagtt

SEQ ID NO: 1362 - DNA, 21 bp, synthetic construct
  source 1..21: mol_type = other DNA
  modified_base 1: mod_base = OTHER; note = uridine-3'-phosphate
  modified_base 2: mod_base = OTHER; note = cytidine-3'-phosphate
  modified_base 3: mod_base = OTHER; note = uridine-3'-phosphate
  modified_base 4: mod_base = OTHER; note = guanosine-3'-phosphate
  modified_base 5: mod_base = OTHER; note = cytidine-3'-phosphate
  modified_base 6: mod_base = OTHER; note = uridine-3'-phosphate
  modified_base 7: mod_base = OTHER; note = cytidine-3'-phosphate
  modified_base 8: mod_base = OTHER; note = uridine-3'-phosphate
  modified_base 9: mod_base = OTHER; note = cytidine-3'-phosphate
  modified_base 10: mod_base = OTHER; note = uridine-3'-phosphate
  modified_base 11: mod_base = OTHER; note = guanosine-3'-phosphate
  modified_base 12: mod_base = OTHER; note = guanosine-3'-phosphate
  modified_base 13: mod_base = OTHER; note = adenosine-3'-phosphate
  modified_base 14: mod_base = OTHER; note = guanosine-3'-phosphate
  modified_base 15: mod_base = OTHER; note = guanosine-3'-phosphate
  modified_base 16: mod_base = OTHER; note = cytidine-3'-phosphate
  modified_base 17: mod_base = OTHER; note = adenosine-3'-phosphate
  modified_base 18: mod_base = OTHER; note = adenosine-3'-phosphate
  modified_base 19: mod_base = OTHER; note = guanosine-3'-phosphate
  misc_feature 1..19: note = RNA
  misc_feature 20..21: note = DNA
tctgctctctggaggcaagtt

SEQ ID NO: 1363 - DNA, 21 bp, synthetic construct
  source 1..21: mol_type = other DNA
  modified_base 1: mod_base = OTHER; note = cytidine-3'-phosphate
  modified_base 2: mod_base = OTHER; note = uridine-3'-phosphate
  modified_base 3: mod_base = OTHER; note = guanosine-3'-phosphate
  modified_base 4: mod_base = OTHER; note = guanosine-3'-phosphate
  modified_base 5: mod_base = OTHER; note = adenosine-3'-phosphate
  modified_base 6: mod_base = OTHER; note = adenosine-3'-phosphate
  modified_base 7: mod_base = OTHER; note = uridine-3'-phosphate
  modified_base 8: mod_base = OTHER; note = cytidine-3'-phosphate
  modified_base 9: mod_base = OTHER; note = uridine-3'-phosphate
  modified_base 10: mod_base = OTHER; note = guanosine-3'-phosphate
  modified_base 11: mod_base = OTHER; note = cytidine-3'-phosphate
  modified_base 12: mod_base = OTHER; note = uridine-3'-phosphate
  modified_base 13: mod_base = OTHER; note = cytidine-3'-phosphate
  modified_base 14: mod_base = OTHER; note = uridine-3'-phosphate
  modified_base 15: mod_base = OTHER; note = cytidine-3'-phosphate
  modified_base 16: mod_base = OTHER; note = uridine-3'-phosphate
  modified_base 17: mod_base = OTHER; note = guanosine-3'-phosphate
  modified_base 18: mod_base = OTHER; note = guanosine-3'-phosphate
  modified_base 19: mod_base = OTHER; note = adenosine-3'-phosphate
  misc_feature 1..19: note = RNA
  misc_feature 20..21: note = DNA
ctggaatctgctctctggatt

SEQ ID NO: 1364 - DNA, 21 bp, synthetic construct
  source 1..21: mol_type = other DNA
  modified_base 1: mod_base = OTHER; note = guanosine-3'-phosphate
  modified_base 2: mod_base = OTHER; note = guanosine-3'-phosphate
  modified_base 3: mod_base = OTHER; note = cytidine-3'-phosphate
  modified_base 4: mod_base = OTHER; note = uridine-3'-phosphate
  modified_base 5: mod_base = OTHER; note = uridine-3'-phosphate
  modified_base 6: mod_base = OTHER; note = cytidine-3'-phosphate
  modified_base 7: mod_base = OTHER; note = cytidine-3'-phosphate
  modified_base 8: mod_base = OTHER; note = guanosine-3'-phosphate
  modified_base 9: mod_base = OTHER; note = adenosine-3'-phosphate
  modified_base 10: mod_base = OTHER; note = adenosine-3'-phosphate
  modified_base 11: mod_base = OTHER; note = guanosine-3'-phosphate
  modified_base 12: mod_base = OTHER; note = cytidine-3'-phosphate
  modified_base 13: mod_base = OTHER; note = uridine-3'-phosphate
  modified_base 14: mod_base = OTHER; note = guanosine-3'-phosphate
  modified_base 15: mod_base = OTHER; note = guanosine-3'-phosphate
  modified_base 16: mod_base = OTHER; note = adenosine-3'-phosphate
  modified_base 17: mod_base = OTHER; note = adenosine-3'-phosphate
  modified_base 18: mod_base = OTHER; note = uridine-3'-phosphate
  modified_base 19: mod_base = OTHER; note = cytidine-3'-phosphate
  misc_feature 1..19: note = RNA
  misc_feature 20..21: note = DNA
ggcttccgaagctggaatctt

SEQ ID NO: 1365 - DNA, 21 bp, synthetic construct
  source 1..21: mol_type = other DNA
  modified_base 1: mod_base = OTHER; note = adenosine-3'-phosphate
  modified_base 2: mod_base = OTHER; note = uridine-3'-phosphate
  modified_base 3: mod_base = OTHER; note = guanosine-3'-phosphate
  modified_base 4: mod_base = OTHER; note = guanosine-3'-phosphate
  modified_base 5: mod_base = OTHER; note = guanosine-3'-phosphate
  modified_base 6: mod_base = OTHER; note = adenosine-3'-phosphate
  modified_base 7: mod_base = OTHER; note = guanosine-3'-phosphate
  modified_base 8: mod_base = OTHER; note = cytidine-3'-phosphate
  modified_base 9: mod_base = OTHER; note = adenosine-3'-phosphate
  modified_base 10: mod_base = OTHER; note = cytidine-3'-phosphate
  modified_base 11: mod_base = OTHER; note = cytidine-3'-phosphate
  modified_base 12: mod_base = OTHER; note = uridine-3'-phosphate
  modified_base 13: mod_base = OTHER; note = uridine-3'-phosphate
  modified_base 14: mod_base = OTHER; note = cytidine-3'-phosphate
  modified_base 15: mod_base = OTHER; note = cytidine-3'-phosphate
  modified_base 16: mod_base = OTHER; note = adenosine-3'-phosphate
  modified_base 17: mod_base = OTHER; note = uridine-3'-phosphate
  modified_base 18: mod_base = OTHER; note = uridine-3'-phosphate
  modified_base 19: mod_base = OTHER; note = cytidine-3'-phosphate
  misc_feature 1..19: note = RNA
  misc_feature 20..21: note = DNA
atgggagcaccttccattctt

SEQ ID NO: 1366 - DNA, 21 bp, synthetic construct
  source 1..21: mol_type = other DNA
  modified_base 1: mod_base = OTHER; note = uridine-3'-phosphate
  modified_base 2: mod_base = OTHER; note = cytidine-3'-phosphate
  modified_base 3: mod_base = OTHER; note = cytidine-3'-phosphate
  modified_base 4: mod_base = OTHER; note = cytidine-3'-phosphate
  modified_base 5: mod_base = OTHER; note = cytidine-3'-phosphate
  modified_base 6: mod_base = OTHER; note = uridine-3'-phosphate
  modified_base 7: mod_base = OTHER; note = cytidine-3'-phosphate
  modified_base 8: mod_base = OTHER; note = cytidine-3'-phosphate
  modified_base 9: mod_base = OTHER; note = guanosine-3'-phosphate
  modified_base 10: mod_base = OTHER; note = adenosine-3'-phosphate
  modified_base 11: mod_base = OTHER; note = uridine-3'-phosphate
  modified_base 12: mod_base = OTHER; note = guanosine-3'-phosphate
  modified_base 13: mod_base = OTHER; note = guanosine-3'-phosphate
  modified_base 14: mod_base = OTHER; note = guanosine-3'-phosphate
  modified_base 15: mod_base = OTHER; note = adenosine-3'-phosphate
  modified_base 16: mod_base = OTHER; note = guanosine-3'-phosphate
  modified_base 17: mod_base = OTHER; note = cytidine-3'-phosphate
  modified_base 18: mod_base = OTHER; note = adenosine-3'-phosphate
  modified_base 19: mod_base = OTHER; note = cytidine-3'-phosphate
  misc_feature 1..19: note = RNA
  misc_feature 20..21: note = DNA
tcccctccgatgggagcactt

SEQ ID NO: 1367 - DNA, 21 bp, synthetic construct
  source 1..21: mol_type = other DNA
  modified_base 1: mod_base = OTHER; note = cytidine-3'-phosphate
  modified_base 2: mod_base = OTHER; note = uridine-3'-phosphate
  modified_base 3: mod_base = OTHER; note = cytidine-3'-phosphate
  modified_base 4: mod_base = OTHER; note = uridine-3'-phosphate
  modified_base 5: mod_base = OTHER; note = guanosine-3'-phosphate
  modified_base 6: mod_base = OTHER; note = adenosine-3'-phosphate
  modified_base 7: mod_base = OTHER; note = guanosine-3'-phosphate
  modified_base 8: mod_base = OTHER; note = guanosine-3'-phosphate
  modified_base 9: mod_base = OTHER; note = guanosine-3'-phosphate
  modified_base 10: mod_base = OTHER; note = uridine-3'-phosphate
  modified_base 11: mod_base = OTHER; note = cytidine-3'-phosphate
  modified_base 12: mod_base = OTHER; note = cytidine-3'-phosphate
  modified_base 13: mod_base = OTHER; note = cytidine-3'-phosphate
  modified_base 14: mod_base = OTHER; note = cytidine-3'-phosphate
  modified_base 15: mod_base = OTHER; note = uridine-3'-phosphate
  modified_base 16: mod_base = OTHER; note = cytidine-3'-phosphate
  modified_base 17: mod_base = OTHER; note = cytidine-3'-phosphate
  modified_base 18: mod_base = OTHER; note = guanosine-3'-phosphate
  modified_base 19: mod_base = OTHER; note = adenosine-3'-phosphate
  misc_feature 1..19: note = RNA
  misc_feature 20..21: note = DNA
ctctgagggtcccctccgatt

SEQ ID NO: 1368 - DNA, 21 bp, synthetic construct
  source 1..21: mol_type = other DNA
  modified_base 1: mod_base = OTHER; note = guanosine-3'-phosphate
  modified_base 2: mod_base = OTHER; note = uridine-3'-phosphate
  modified_base 3: mod_base = OTHER; note = cytidine-3'-phosphate
  modified_base 4: mod_base = OTHER; note = uridine-3'-phosphate
  modified_base 5: mod_base = OTHER; note = cytidine-3'-phosphate
  modified_base 6: mod_base = OTHER; note = cytidine-3'-phosphate
  modified_base 7: mod_base = OTHER; note = adenosine-3'-phosphate
  modified_base 8: mod_base = OTHER; note = guanosine-3'-phosphate
  modified_base 9: mod_base = OTHER; note = guanosine-3'-phosphate
  modified_base 10: mod_base = OTHER; note = guanosine-3'-phosphate
  modified_base 11: mod_base = OTHER; note = cytidine-3'-phosphate
  modified_base 12: mod_base = OTHER; note = uridine-3'-phosphate
  modified_base 13: mod_base = OTHER; note = cytidine-3'-phosphate
  modified_base 14: mod_base = OTHER; note = uridine-3'-phosphate
  modified_base 15: mod_base = OTHER; note = guanosine-3'-phosphate
  modified_base 16: mod_base = OTHER; note = adenosine-3'-phosphate
  modified_base 17: mod_base = OTHER; note = guanosine-3'-phosphate
  modified_base 18: mod_base = OTHER; note = guanosine-3'-phosphate
  modified_base 19: mod_base = OTHER; note = guanosine-3'-phosphate
  misc_feature 1..19: note = RNA
  misc_feature 20..21: note = DNA
gtctccagggctctgagggtt

SEQ ID NO: 1369 - DNA, 21 bp, synthetic construct
  source 1..21: mol_type = other DNA
  modified_base 1: mod_base = OTHER; note = adenosine-3'-phosphate
  modified_base 2: mod_base = OTHER; note = guanosine-3'-phosphate
  modified_base 3: mod_base = OTHER; note = guanosine-3'-phosphate
  modified_base 4: mod_base = OTHER; note = cytidine-3'-phosphate
  modified_base 5: mod_base = OTHER; note = cytidine-3'-phosphate
  modified_base 6: mod_base = OTHER; note = cytidine-3'-phosphate
  modified_base 7: mod_base = OTHER; note = adenosine-3'-phosphate
  modified_base 8: mod_base = OTHER; note = cytidine-3'-phosphate
  modified_base 9: mod_base = OTHER; note = cytidine-3'-phosphate
  modified_base 10: mod_base = OTHER; note = uridine-3'-phosphate
  modified_base 11: mod_base = OTHER; note = guanosine-3'-phosphate
  modified_base 12: mod_base = OTHER; note = guanosine-3'-phosphate
  modified_base 13: mod_base = OTHER; note = cytidine-3'-phosphate
  modified_base 14: mod_base = OTHER; note = adenosine-3'-phosphate
  modified_base 15: mod_base = OTHER; note = guanosine-3'-phosphate
  modified_base 16: mod_base = OTHER; note = uridine-3'-phosphate
  modified_base 17: mod_base = OTHER; note = cytidine-3'-phosphate
  modified_base 18: mod_base = OTHER; note = uridine-3'-phosphate
  modified_base 19: mod_base = OTHER; note = cytidine-3'-phosphate
  misc_feature 1..19: note = RNA
  misc_feature 20..21: note = DNA
aggcccacctggcagtctctt

SEQ ID NO: 1370 - DNA, 21 bp, synthetic construct
  source 1..21: mol_type = other DNA
  modified_base 1: mod_base = OTHER; note = adenosine-3'-phosphate
  modified_base 2: mod_base = OTHER; note = guanosine-3'-phosphate
  modified_base 3: mod_base = OTHER; note = uridine-3'-phosphate
  modified_base 4: mod_base = OTHER; note = guanosine-3'-phosphate
  modified_base 5: mod_base = OTHER; note = guanosine-3'-phosphate
  modified_base 6: mod_base = OTHER; note = cytidine-3'-phosphate
  modified_base 7: mod_base = OTHER; note = adenosine-3'-phosphate
  modified_base 8: mod_base = OTHER; note = guanosine-3'-phosphate
  modified_base 9: mod_base = OTHER; note = cytidine-3'-phosphate
  modified_base 10: mod_base = OTHER; note = adenosine-3'-phosphate
  modified_base 11: mod_base = OTHER; note = guanosine-3'-phosphate
  modified_base 12: mod_base = OTHER; note = guanosine-3'-phosphate
  modified_base 13: mod_base = OTHER; note = cytidine-3'-phosphate
  modified_base 14: mod_base = OTHER; note = cytidine-3'-phosphate
  modified_base 15: mod_base = OTHER; note = cytidine-3'-phosphate
  modified_base 16: mod_base = OTHER; note = adenosine-3'-phosphate
  modified_base 17: mod_base = OTHER; note = cytidine-3'-phosphate
  modified_base 18: mod_base = OTHER; note = cytidine-3'-phosphate
  modified_base 19: mod_base = OTHER; note = uridine-3'-phosphate
  misc_feature 1..19: note = RNA
  misc_feature 20..21: note = DNA
agtggcagcaggcccaccttt

SEQ ID NO: 1371 - DNA, 21 bp, synthetic construct
  source 1..21: mol_type = other DNA
  modified_base 1: mod_base = OTHER; note = uridine-3'-phosphate
  modified_base 2: mod_base = OTHER; note = uridine-3'-phosphate
  modified_base 3: mod_base = OTHER; note = uridine-3'-phosphate
  modified_base 4: mod_base = OTHER; note = uridine-3'-phosphate
  modified_base 5: mod_base = OTHER; note = guanosine-3'-phosphate
  modified_base 6: mod_base = OTHER; note = guanosine-3'-phosphate
  modified_base 7: mod_base = OTHER; note = cytidine-3'-phosphate
  modified_base 8: mod_base = OTHER; note = uridine-3'-phosphate
  modified_base 9: mod_base = OTHER; note = uridine-3'-phosphate
  modified_base 10: mod_base = OTHER; note = adenosine-3'-phosphate
  modified_base 11: mod_base = OTHER; note = cytidine-3'-phosphate
  modified_base 12: mod_base = OTHER; note = adenosine-3'-phosphate
  modified_base 13: mod_base = OTHER; note = guanosine-3'-phosphate
  modified_base 14: mod_base = OTHER; note = uridine-3'-phosphate
  modified_base 15: mod_base = OTHER; note = guanosine-3'-phosphate
  modified_base 16: mod_base = OTHER; note = guanosine-3'-phosphate
  modified_base 17: mod_base = OTHER; note = cytidine-3'-phosphate
  modified_base 18: mod_base = OTHER; note = adenosine-3'-phosphate
  modified_base 19: mod_base = OTHER; note = guanosine-3'-phosphate
  misc_feature 1..19: note = RNA
  misc_feature 20..21: note = DNA
ttttggcttacagtggcagtt

SEQ ID NO: 1372 - DNA, 21 bp, synthetic construct
  source 1..21: mol_type = other DNA
  modified_base 1: mod_base = OTHER; note = cytidine-3'-phosphate
  modified_base 2: mod_base = OTHER; note = cytidine-3'-phosphate
  modified_base 3: mod_base = OTHER; note = cytidine-3'-phosphate
  modified_base 4: mod_base = OTHER; note = adenosine-3'-phosphate
  modified_base 5: mod_base = OTHER; note = cytidine-3'-phosphate
  modified_base 6: mod_base = OTHER; note = cytidine-3'-phosphate
  modified_base 7: mod_base = OTHER; note = uridine-3'-phosphate
  modified_base 8: mod_base = OTHER; note = uridine-3'-phosphate
  modified_base 9: mod_base = OTHER; note = uridine-3'-phosphate
  modified_base 10: mod_base = OTHER; note = uridine-3'-phosphate
  modified_base 11: mod_base = OTHER; note = guanosine-3'-phosphate
  modified_base 12: mod_base = OTHER; note = guanosine-3'-phosphate
  modified_base 13: mod_base = OTHER; note = cytidine-3'-phosphate
  modified_base 14: mod_base = OTHER; note = uridine-3'-phosphate
  modified_base 15: mod_base = OTHER; note = uridine-3'-phosphate
  modified_base 16: mod_base = OTHER; note = adenosine-3'-phosphate
  modified_base 17: mod_base = OTHER; note = cytidine-3'-phosphate
  modified_base 18: mod_base = OTHER; note = adenosine-3'-phosphate
  modified_base 19: mod_base = OTHER; note = guanosine-3'-phosphate
  misc_feature 1..19: note = RNA
  misc_feature 20..21: note = DNA
cccaccttttggcttacagtt

SEQ ID NO: 1373 - DNA, 21 bp, synthetic construct
  source 1..21: mol_type = other DNA
  modified_base 1: mod_base = OTHER; note = guanosine-3'-phosphate
  modified_base 2: mod_base = OTHER; note = guanosine-3'-phosphate
  modified_base 3: mod_base = OTHER; note = adenosine-3'-phosphate
  modified_base 4: mod_base = OTHER; note = guanosine-3'-phosphate
  modified_base 5: mod_base = OTHER; note = uridine-3'-phosphate
  modified_base 6: mod_base = OTHER; note = cytidine-3'-phosphate
  modified_base 7: mod_base = OTHER; note = adenosine-3'-phosphate
  modified_base 8: mod_base = OTHER; note = guanosine-3'-phosphate
  modified_base 9: mod_base = OTHER; note = guanosine-3'-phosphate
  modified_base 10: mod_base = OTHER; note = adenosine-3'-phosphate
  modified_base 11: mod_base = OTHER; note = cytidine-3'-phosphate
  modified_base 12: mod_base = OTHER; note = uridine-3'-phosphate
  modified_base 13: mod_base = OTHER; note = uridine-3'-phosphate
  modified_base 14: mod_base = OTHER; note = cytidine-3'-phosphate
  modified_base 15: mod_base = OTHER; note = cytidine-3'-phosphate
  modified_base 16: mod_base = OTHER; note = cytidine-3'-phosphate
  modified_base 17: mod_base = OTHER; note = cytidine-3'-phosphate
  modified_base 18: mod_base = OTHER; note = adenosine-3'-phosphate
  modified_base 19: mod_base = OTHER; note = cytidine-3'-phosphate
  misc_feature 1..19: note = RNA
  misc_feature 20..21: note = DNA
ggagtcaggacttccccactt

SEQ ID NO: 1374 - DNA, 21 bp, synthetic construct
  source 1..21: mol_type = other DNA
  modified_base 1: mod_base = OTHER; note = cytidine-3'-phosphate
  modified_base 2: mod_base = OTHER; note = adenosine-3'-phosphate
  modified_base 3: mod_base = OTHER; note = adenosine-3'-phosphate
  modified_base 4: mod_base = OTHER; note = guanosine-3'-phosphate
  modified_base 5: mod_base = OTHER; note = guanosine-3'-phosphate
  modified_base 6: mod_base = OTHER; note = adenosine-3'-phosphate
  modified_base 7: mod_base = OTHER; note = cytidine-3'-phosphate
  modified_base 8: mod_base = OTHER; note = cytidine-3'-phosphate
  modified_base 9: mod_base = OTHER; note = cytidine-3'-phosphate
  modified_base 10: mod_base = OTHER; note = uridine-3'-phosphate
  modified_base 11: mod_base = OTHER; note = guanosine-3'-phosphate
  modified_base 12: mod_base = OTHER; note = guanosine-3'-phosphate
  modified_base 13: mod_base = OTHER; note = adenosine-3'-phosphate
  modified_base 14: mod_base = OTHER; note = guanosine-3'-phosphate
  modified_base 15: mod_base = OTHER; note = uridine-3'-phosphate
  modified_base 16: mod_base = OTHER; note = cytidine-3'-phosphate
  modified_base 17: mod_base = OTHER; note = adenosine-3'-phosphate
  modified_base 18: mod_base = OTHER; note = guanosine-3'-phosphate
  modified_base 19: mod_base = OTHER; note = guanosine-3'-phosphate
  misc_feature 1..19: note = RNA
  misc_feature 20..21: note = DNA
caaggaccctggagtcaggtt

SEQ ID NO: 1375 - DNA, 21 bp, synthetic construct
  source 1..21: mol_type = other DNA
  modified_base 1: mod_base = OTHER; note = adenosine-3'-phosphate
  modified_base 2: mod_base = OTHER; note = guanosine-3'-phosphate
  modified_base 3: mod_base = OTHER; note = guanosine-3'-phosphate
  modified_base 4: mod_base = OTHER; note = guanosine-3'-phosphate
  modified_base 5: mod_base = OTHER; note = guanosine-3'-phosphate
  modified_base 6: mod_base = OTHER; note = uridine-3'-phosphate
  modified_base 7: mod_base = OTHER; note = guanosine-3'-phosphate
  modified_base 8: mod_base = OTHER; note = guanosine-3'-phosphate
  modified_base 9: mod_base = OTHER; note = guanosine-3'-phosphate
  modified_base 10: mod_base = OTHER; note = guanosine-3'-phosphate
  modified_base 11: mod_base = OTHER; note = cytidine-3'-phosphate
  modified_base 12: mod_base = OTHER; note = adenosine-3'-phosphate
  modified_base 13: mod_base = OTHER; note = adenosine-3'-phosphate
  modified_base 14: mod_base = OTHER; note = guanosine-3'-phosphate
  modified_base 15: mod_base = OTHER; note = guanosine-3'-phosphate
  modified_base 16: mod_base = OTHER; note = adenosine-3'-phosphate
  modified_base 17: mod_base = OTHER; note = cytidine-3'-phosphate
  modified_base 18: mod_base = OTHER; note = cytidine-3'-phosphate
  modified_base 19: mod_base = OTHER; note = cytidine-3'-phosphate
  misc_feature 1..19: note = RNA
  misc_feature 20..21: note = DNA
aggggtggggcaaggaccctt

SEQ ID NO: 1376 - DNA, 21 bp, synthetic construct
  source 1..21: mol_type = other DNA
  modified_base 1: mod_base = OTHER; note = uridine-3'-phosphate
  modified_base 2: mod_base = OTHER; note = guanosine-3'-phosphate
  modified_base 3: mod_base = OTHER; note = guanosine-3'-phosphate
  modified_base 4: mod_base = OTHER; note = cytidine-3'-phosphate
  modified_base 5: mod_base = OTHER; note = adenosine-3'-phosphate
  modified_base 6: mod_base = OTHER; note = guanosine-3'-phosphate
  modified_base 7: mod_base = OTHER; note = guanosine-3'-phosphate
  modified_base 8: mod_base = OTHER; note = cytidine-3'-phosphate
  modified_base 9: mod_base = OTHER; note = adenosine-3'-phosphate
  modified_base 10: mod_base = OTHER; note = guanosine-3'-phosphate
  modified_base 11: mod_base = OTHER; note = guanosine-3'-phosphate
  modified_base 12: mod_base = OTHER; note = guanosine-3'-phosphate
  modified_base 13: mod_base = OTHER; note = guanosine-3'-phosphate
  modified_base 14: mod_base = OTHER; note = uridine-3'-phosphate
  modified_base 15: mod_base = OTHER; note = guanosine-3'-phosphate
  modified_base 16: mod_base = OTHER; note = guanosine-3'-phosphate
  modified_base 17: mod_base = OTHER; note = guanosine-3'-phosphate
  modified_base 18: mod_base = OTHER; note = guanosine-3'-phosphate
  modified_base 19: mod_base = OTHER; note = cytidine-3'-phosphate
  misc_feature 1..19: note = RNA
  misc_feature 20..21: note = DNA
tggcaggcaggggtggggctt

SEQ ID NO: 1377 - DNA, 21 bp, synthetic construct
  source 1..21: mol_type = other DNA
  modified_base 1: mod_base = OTHER; note = uridine-3'-phosphate
  modified_base 2: mod_base = OTHER; note = guanosine-3'-phosphate
  modified_base 3: mod_base = OTHER; note = adenosine-3'-phosphate
  modified_base 4: mod_base = OTHER; note = guanosine-3'-phosphate
  modified_base 5: mod_base = OTHER; note = guanosine-3'-phosphate
  modified_base 6: mod_base = OTHER; note = guanosine-3'-phosphate
  modified_base 7: mod_base = OTHER; note = cytidine-3'-phosphate
  modified_base 8: mod_base = OTHER; note = cytidine-3'-phosphate
  modified_base 9: mod_base = OTHER; note = cytidine-3'-phosphate
  modified_base 10: mod_base = OTHER; note = adenosine-3'-phosphate
  modified_base 11: mod_base = OTHER; note = guanosine-3'-phosphate
  modified_base 12: mod_base = OTHER; note = guanosine-3'-phosphate
  modified_base 13: mod_base = OTHER; note = uridine-3'-phosphate
  modified_base 14: mod_base = OTHER; note = guanosine-3'-phosphate
  modified_base 15: mod_base = OTHER; note = guanosine-3'-phosphate
  modified_base 16: mod_base = OTHER; note = cytidine-3'-phosphate
  modified_base 17: mod_base = OTHER; note = adenosine-3'-phosphate
  modified_base 18: mod_base = OTHER; note = guanosine-3'-phosphate
  modified_base 19: mod_base = OTHER; note = guanosine-3'-phosphate
  misc_feature 1..19: note = RNA
  misc_feature 20..21: note = DNA
tgagggcccaggtggcaggtt

SEQ ID NO: 1378 - DNA, 21 bp, synthetic construct
  source 1..21: mol_type = other DNA
  modified_base 1: mod_base = OTHER; note = cytidine-3'-phosphate
  modified_base 2: mod_base = OTHER; note = uridine-3'-phosphate
  modified_base 3: mod_base = OTHER; note = guanosine-3'-phosphate
  modified_base 4: mod_base = OTHER; note = guanosine-3'-phosphate
  modified_base 5: mod_base = OTHER; note = guanosine-3'-phosphate
  modified_base 6: mod_base = OTHER; note = cytidine-3'-phosphate
  modified_base 7: mod_base = OTHER; note = uridine-3'-phosphate
  modified_base 8: mod_base = OTHER; note = guanosine-3'-phosphate
  modified_base 9: mod_base = OTHER; note = uridine-3'-phosphate
  modified_base 10: mod_base = OTHER; note = guanosine-3'-phosphate
  modified_base 11: mod_base = OTHER; note = adenosine-3'-phosphate
  modified_base 12: mod_base = OTHER; note = guanosine-3'-phosphate
  modified_base 13: mod_base = OTHER; note = guanosine-3'-phosphate
  modified_base 14: mod_base = OTHER; note = guanosine-3'-phosphate
  modified_base 15: mod_base = OTHER; note = cytidine-3'-phosphate
  modified_base 16: mod_base = OTHER; note = cytidine-3'-phosphate
  modified_base 17: mod_base = OTHER; note = cytidine-3'-phosphate
  modified_base 18: mod_base = OTHER; note = adenosine-3'-phosphate
  modified_base 19: mod_base = OTHER; note = guanosine-3'-phosphate
  misc_feature 1..19: note = RNA
  misc_feature 20..21: note = DNA
ctgggctgtgagggcccagtt

SEQ ID NO: 1379 - DNA, 21 bp, synthetic construct
  source 1..21: mol_type = other DNA
  modified_base 1: mod_base = OTHER; note = guanosine-3'-phosphate
  modified_base 2: mod_base = OTHER; note = uridine-3'-phosphate
  modified_base 3: mod_base = OTHER; note = guanosine-3'-phosphate
  modified_base 4: mod_base = OTHER; note = adenosine-3'-phosphate
  modified_base 5: mod_base = OTHER; note = guanosine-3'-phosphate
  modified_base 6: mod_base = OTHER; note = guanosine-3'-phosphate
  modified_base 7: mod_base = OTHER; note = guanosine-3'-phosphate
  modified_base 8: mod_base = OTHER; note = uridine-3'-phosphate
  modified_base 9: mod_base = OTHER; note = cytidine-3'-phosphate
  modified_base 10: mod_base = OTHER; note = uridine-3'-phosphate
  modified_base 11: mod_base = OTHER; note = guanosine-3'-phosphate
  modified_base 12: mod_base = OTHER; note = guanosine-3'-phosphate
  modified_base 13: mod_base = OTHER; note = guanosine-3'-phosphate
  modified_base 14: mod_base = OTHER; note = cytidine-3'-phosphate
  modified_base 15: mod_base = OTHER; note = uridine-3'-phosphate
  modified_base 16: mod_base = OTHER; note = guanosine-3'-phosphate
  modified_base 17: mod_base = OTHER; note = uridine-3'-phosphate
  modified_base 18: mod_base = OTHER; note = guanosine-3'-phosphate
  modified_base 19: mod_base = OTHER; note = adenosine-3'-phosphate
  misc_feature 1..19: note = RNA
  misc_feature 20..21: note = DNA
gtgagggtctgggctgtgatt

SEQ ID NO: 1380 - DNA, 21 bp, synthetic construct
  source 1..21: mol_type = other DNA
  modified_base 1: mod_base = OTHER; note = guanosine-3'-phosphate
  modified_base 2: mod_base = OTHER; note = adenosine-3'-phosphate
  modified_base 3: mod_base = OTHER; note = guanosine-3'-phosphate
  modified_base 4: mod_base = OTHER; note = cytidine-3'-phosphate
  modified_base 5: mod_base = OTHER; note = uridine-3'-phosphate
  modified_base 6: mod_base = OTHER; note = cytidine-3'-phosphate
  modified_base 7: mod_base = OTHER; note = adenosine-3'-phosphate
  modified_base 8: mod_base = OTHER; note = cytidine-3'-phosphate
  modified_base 9: mod_base = OTHER; note = cytidine-3'-phosphate
  modified_base 10: mod_base = OTHER; note = uridine-3'-phosphate
  modified_base 11: mod_base = OTHER; note = cytidine-3'-phosphate
  modified_base 12: mod_base = OTHER; note = cytidine-3'-phosphate
  modified_base 13: mod_base = OTHER; note = cytidine-3'-phosphate
  modified_base 14: mod_base = OTHER; note = adenosine-3'-phosphate
  modified_base 15: mod_base = OTHER; note = guanosine-3'-phosphate
  modified_base 16: mod_base = OTHER; note = uridine-3'-phosphate
  modified_base 17: mod_base = OTHER; note = guanosine-3'-phosphate
  modified_base 18: mod_base = OTHER; note = adenosine-3'-phosphate
  modified_base 19: mod_base = OTHER; note = guanosine-3'-phosphate
  misc_feature 1..19: note = RNA
  misc_feature 20..21: note = DNA
gagctcacctcccagtgagtt

SEQ ID NO: 1381 - DNA, 21 bp, synthetic construct
  source 1..21: mol_type = other DNA
  modified_base 1: mod_base = OTHER; note = adenosine-3'-phosphate
  modified_base 2: mod_base = OTHER; note = adenosine-3'-phosphate
  modified_base 3: mod_base = OTHER; note = guanosine-3'-phosphate
  modified_base 4: mod_base = OTHER; note = guanosine-3'-phosphate
  modified_base 5: mod_base = OTHER; note = guanosine-3'-phosphate
  modified_base 6: mod_base = OTHER; note = cytidine-3'-phosphate
  modified_base 7: mod_base = OTHER; note = adenosine-3'-phosphate
  modified_base 8: mod_base = OTHER; note = guanosine-3'-phosphate
  modified_base 9: mod_base = OTHER; note = cytidine-3'-phosphate
  modified_base 10: mod_base = OTHER; note = uridine-3'-phosphate
  modified_base 11: mod_base = OTHER; note = guanosine-3'-phosphate
  modified_base 12: mod_base = OTHER; note = adenosine-3'-phosphate
  modified_base 13: mod_base = OTHER; note = guanosine-3'-phosphate
  modified_base 14: mod_base = OTHER; note = cytidine-3'-phosphate
  modified_base 15: mod_base = OTHER; note = uridine-3'-phosphate
  modified_base 16: mod_base = OTHER; note = cytidine-3'-phosphate
  modified_base 17: mod_base = OTHER; note = adenosine-3'-phosphate
  modified_base 18: mod_base = OTHER; note = cytidine-3'-phosphate
  modified_base 19: mod_base = OTHER; note = cytidine-3'-phosphate
  misc_feature 1..19: note = RNA
  misc_feature 20..21: note = DNA
aagggcagctgagctcacctt

SEQ ID NO: 1382 - DNA, 21 bp, synthetic construct
  source 1..21: mol_type = other DNA
  modified_base 1: mod_base = OTHER; note = adenosine-3'-phosphate
  modified_base 2: mod_base = OTHER; note = uridine-3'-phosphate
  modified_base 3: mod_base = OTHER; note = cytidine-3'-phosphate
  modified_base 4: mod_base = OTHER; note = adenosine-3'-phosphate
  modified_base 5: mod_base = OTHER; note = guanosine-3'-phosphate
  modified_base 6: mod_base = OTHER; note = guanosine-3'-phosphate
  modified_base 7: mod_base = OTHER; note = cytidine-3'-phosphate
  modified_base 8: mod_base = OTHER; note = adenosine-3'-phosphate
  modified_base 9: mod_base = OTHER; note = guanosine-3'-phosphate
  modified_base 10: mod_base = OTHER; note = cytidine-3'-phosphate
  modified_base 11: mod_base = OTHER; note = uridine-3'-phosphate
  modified_base 12: mod_base = OTHER; note = uridine-3'-phosphate
  modified_base 13: mod_base = OTHER; note = uridine-3'-phosphate
  modified_base 14: mod_base = OTHER; note = adenosine-3'-phosphate
  modified_base 15: mod_base = OTHER; note = uridine-3'-phosphate
  modified_base 16: mod_base = OTHER; note = uridine-3'-phosphate
  modified_base 17: mod_base = OTHER; note = cytidine-3'-phosphate
  modified_base 18: mod_base = OTHER; note = cytidine-3'-phosphate
  modified_base 19: mod_base = OTHER; note = adenosine-3'-phosphate
  misc_feature 1..19: note = RNA
  misc_feature 20..21: note = DNA
atcaggcagctttattccatt
